(19) United States
(12) Patent Application Publication
(10) Pub. No.: US 2005/0233383 A1
(43) Pub. Date: Oct. 20, 2005

(54) Human olfactory receptors and genes encoding same

(75) Inventor: Sergey Zozulya, San Diego, CA (US)

Correspondence Address: CROWELL & MORING LLP;INTELLECTUAL PROPERTY GROUP, P.O. BOX 14300, WASHINGTON, DC, 20044-4300, US

(73) Assignee: Senomyx, Inc.

(21) Appl. No.: 10/819,316

(22) Filed: Apr. 7, 2004

Related U.S. Application Data
(62) Division of application No. 09/804,291, filed on Mar. 13, 2001.
(60) Provisional application No. 60/188,914, filed on Mar. 13, 2000.
(60) Provisional application No. 60/192,033, filed on Mar. 24, 2000.
(60) Provisional application No. 60/198,474, filed on Apr. 14, 2000.
(60) Provisional application No. 60/199,335, filed on Apr. 24, 2000.
(60) Provisional application No. 60/207,702, filed on May 26, 2000.
(60) Provisional application No. 60/213,849, filed on Jun. 23, 2000.
(60) Provisional application No. 60/226,534, filed on Aug. 16, 2000.
(60) Provisional application No. 60/230,732, filed on Sep. 7, 2000.
(60) Provisional application No. 60/266,862, filed on Feb. 7, 2001.

(51) Int. Cl. C12Q 1/68; G01N 33/53; G01N 33/567

(52) U.S. Cl. 435/7.2; 435/6

(57) ABSTRACT

The invention relates to cloned human olfactory receptors and the use thereof for identifying compounds that modulate olfaction.

### CROSS REFERENCE TO RELATED APPLICATIONS

[0001] This application claims priority to the following provisional applications: U.S. Ser. No. 60/188,914, filed Mar. 13, 2000, entitled, “NOVEL OLFACTORY RECEPTORS AND GENES ENCODING SAME,” to Zozulya; U.S. Ser. No. 60/192,033, filed Mar. 24, 2000, entitled, “NOVEL OLFACTORY RECEPTORS AND GENES ENCODING SAME,” to Zozulya; U.S. Ser. No. 60/198,474, filed Apr. 12, 2000, entitled, “NOVEL OLFACTORY RECEPTORS AND GENE ENCODING THE SAME to Zozulya; U.S. Ser. No. 60/199,335, filed Apr. 24, 2000, “HUMAN OLFACTORY RECEPTORS AND GENES ENCODING THE SAME”, to Zozulya; U.S. Ser. No. 60/207,702, filed May 26, 2000, entitled, “HUMAN OLFACTORY RECEPTORS AND GENES ENCODING THE SAME”, to Zozulya; U.S. Ser. No. 60/213,849, filed Jun. 23, 2000, entitled, “HUMAN OLFACTORY RECEPTORS AND GENES ENCODING THE SAME”, to Zozulya; U.S. Ser. No. 60/226,534, filed Aug. 16, 2000, “HUMAN OLFACTORY RECEPTORS AND GENES ENCODING THE SAME”, to Zozulya; U.S. Ser. No. 60/230,732, filed Sep. 7, 2000, “HUMAN OLFACTORY RECEPTORS AND GENES ENCODING THE SAME”, to Zozulya; and U.S. Ser. No. 60/266,862, filed Feb. 7, 2001, “HUMAN OLFACTORY RECEPTORS AND GENES ENCODING THE SAME”, to Zozulya. All of these applications are herein incorporated by reference in their entireties.

### FIELD OF THE INVENTION

[0002] The invention relates to newly identified mammalian chemosensory G protein-coupled receptors, particularly olfactory receptors, fragments thereof, classes of such receptors, genes and cDNAs encoding said receptors, vectors including said receptors, and cells that express said receptors. The invention also relates to methods of using such receptors, fragments, genes, cDNAs, vectors, and cells to identify molecules involved in olfactory perception. The invention therefore has application in the selection and design of odorant compositions, as well as malodor blockers (olfactory receptor antagonists), particularly perfumes and fragrance compositions and components of deodorants and other malodor blocking compositions.

### DESCRIPTION OF THE RELATED ART

[0003] The olfactory system provides sensory information about the chemical composition of the external world. Olfactory sensation is thought to involve distinct signaling pathways. These pathways are believed to be mediated by olfactory receptors (ORs). Cells which express olfactory receptors, when exposed to certain chemical stimuli, elicit olfactory sensation by depolarizing to generate an action potential, which is believed to trigger the sensation.

[0004] As such, olfactory receptors specifically recognize molecules that elicit specific olfactory sensation. These molecules are also referred to herein as “odorants.” Olfactory receptors belong to the 7-transmembrane receptor superfamily (Buck et al., Cell 65:175-87 (1991)), which are also known as G protein-coupled receptors (GPCRs). G protein-coupled receptors control many physiological functions, such as endocrine function, exocrine function, heart rate, lipolysis, carbohydrate metabolism, and transmembrane signaling. The biochemical analysis and molecular cloning of a number of such receptors has revealed many basic principles regarding the function of these receptors.

[0005] For example, U.S. Pat. No. 5,691,188 describes how upon a ligand binding to a GPCR, the receptor presumably undergoes a conformational change leading to activation of the G protein. G proteins are comprised of three subunits: a guanyl nucleotide binding α subunit, a β subunit, and a γ subunit. G proteins cycle between two forms, depending on whether GDP or GTP is bound to the α subunit. When GDP is bound, the G protein exists as a heterotrimer: the Gαβγ complex. When GTP is bound, the α subunit dissociates from the heterotrimer, leaving a Gβγ complex. When a Gαβγ complex operatively associates with an activated G protein-coupled receptor in a cell membrane, the rate of exchange of GTP for bound GDP is increased and the rate of dissociation of the bound Gα0 subunit from the Gαβγ complex increases. The free Gα subunit and Gβγ complex are thus capable of transmitting a signal to downstream elements of a variety of signal transduction pathways. These events form the basis for a multiplicity of different cell signaling phenomena, including for example the signaling phenomena that are identified as neurological sensory perceptions such as taste and/or smell.

[0006] Genes encoding the olfactory receptors are active primarily in olfactory neurons (Axel, Sci. Amer., 273:154-59 (1995)). Individual olfactory receptor types are expressed in subsets of cells distributed in distinct zones of the olfactory epithelium (Breer, Semin. Cell Biol., 5:25-32 (1994)). The human genome contains approximately one thousand genes that encode a diverse repertoire of olfactory receptors (Rouquier, Nat. Genet., 18:243-50 (1998); Trask, Hum. Mol. Genet., 7:2007-20 (1998)). It has been demonstrated that members of the OR gene family are distributed on all but a few human chromosomes. Through fluorescence in situ hybridization analysis, Rouquier showed that OR sequences reside at more than 25 locations in the human genome. Rouquier also determined that the human genome has accumulated a striking number of dysfunctional OR copies: 72% of the analyzed sequences were found to be pseudogenes. An understanding of an animal's ability to detect and discriminate among the thousands of distinct odorants or tastants, and more particularly to distinguish, for example beneficial tastants or odorants from toxic tastants or odorants, is complicated by the fact that chemosensory receptors belong to a multigene family with over a thousand members. For instance, there are up to 1,000 odorant receptors in mammals.

[0007] Moreover, each chemosensory receptor neuron may express only one or a few of these receptors. With respect to odorant receptors, any given olfactory neuron can respond to a small set of odorant ligands. In addition, odorant discrimination for a given neuron may depend on the ligand specificity of the one or few receptors it expresses. To analyze odorant-receptor interactions and their effects on olfactory cells, specific ligands and the olfactory receptors to which they bind are identified. This analysis requires isolation and expression of olfactory polypeptides, followed by binding assays.

[0008] Some studies suggest that OR genes can be expressed in tissues other that the olfactory epithelium, indicating potential alternative biological roles for this class of chemosensory receptors. Expression of various ORs has been reported in human and murine erythroid cells (Feingold 1999), developing rat heart (Drutel, Receptor Channels, 3(1):33-40 (1995)), avian notochord (Nef, PNAS, 94(9):4766-71 (1997)) and lingual epithelium (Abe, FES Letl., 316(3):253-56 (1993)). One experimentally documented case also established the existence of a large subset of mammalian ORs transcribed in testes and expressed on the surface of mature spermatozoa, thereby suggesting a possible role of ORs in sperm chemotaxis (Parmenthier, Nature, 355:453-55 (1992); Walensky, Mol. Med., 1(2):130-41 (1998); Branscomb, Genetics, 156(2):785-97 (2000)). It was also hypothesized that olfactory receptors might provide molecular codes for highly specific cell-cell recognition functions in development and embryogenesis (Dreyer, PNAS, 95(11):9072-77 (1998)).

[0009] Complete or partial sequences of numerous human and other eukaryotic chemosensory receptors are currently known. See, e.g., Pilpel, Y. and Lancet, D., Protein Science, 8:969-77 (1999); Mombaerts, P., Annu. Rev. Neurosci., 22:487-50 (1999); see also, EP0867508A2, U.S. Pat. No. 5,874,243, WO 92/17585, WO 95/18140, WO 97/17444, WO 99/67282. Due to the complexity of ligand-receptor interactions, and more particularly odorant-receptor interactions, information about ligand-receptor recognition is lacking. In part, the present invention addresses the need for better understanding of these interactions. The present invention also provides, among other things, novel chemosensory receptors, and methods for utilizing such novel chemosensory receptors and the genes and cDNAs encoding such receptors, especially for identifying compounds that can be used to module chemosensory transduction, such as olfaction.

### SUMMARY OF THE INVENTION

[0010] Toward that end, it is an object of the invention to provide a new family of G protein-coupled receptors comprising over two hundred fifty olfactory G protein-coupled receptors (OR) active in olfactory perception. It is another object of the invention to provide fragments and variants of such ORs which retain odorant-binding activity.

[0011] It is yet another object of the invention to provide nucleic acid sequences or molecules that encode such ORs, fragments, or allelic variants.

[0012] It is still another object of the invention to provide expression vectors which include nucleic acid sequences that encode such ORs, or fragments, or variants thereof, which are operably linked to at least one regulatory sequence such as a promoter, enhancer, or other sequences involved in positive or negative gene transcription and/or translation.

[0013] It is still another object of the invention to provide human or non-human cells that functionally express at least one of such ORs, or fragments, or variants thereof.

[0014] It is still another object of the invention to provide OR fusion proteins or polypeptides which include at least a fragment of at least one of such ORs.

[0015] It is another object of the invention to provide an isolated nucleic acid molecule encoding an OR comprising a nucleic acid sequence that is at least 30%, more preferably at least 50%, still more preferably at least 60-70%, and still more preferably 75%, preferably 85%, 90%, 95%, 96%, 97%, 98%, or 99% identical to a nucleic acid sequence selected from the group consisting of: SEQ. ID. NO. 2, SEQ. ID. NO. 4, SEQ. ID. NO. 6, SEQ. ID. NO. 8, SEQ. ID. NO. 10, SEQ. ID. NO. 12, SEQ. ID. NO. 14, SEQ. ID. NO. 16, SEQ. ID. NO. 18, SEQ. ID. NO. 20, SEQ. ID. NO. 22, SEQ. ID. NO. 24, SEQ. ID. NO. 26, SEQ. ID. NO. 28, SEQ. ID. NO. 30, SEQ. ID. NO. 32, SEQ. ID. NO. 34, SEQ. ID. NO. 36, SEQ. ID. NO. 38, SEQ. ID. NO. 40, SEQ. ID. NO. 42, SEQ. ID. NO. 44, SEQ. ID. NO. 46, SEQ. ID. NO. 48, SEQ. ID. NO. 50, SEQ. ID. NO. 52, SEQ. ID. NO. 54, SEQ. ID. NO. 56, SEQ. ID. NO. 58, SEQ. ID. NO. 60, SEQ. ID. NO. 62, SEQ. ID. NO. 64, SEQ. ID. NO. 66, SEQ. ID. NO. 68, SEQ. ID. NO. 70, SEQ. ID. NO. 72, SEQ. ID. NO. 74, SEQ. ID. NO. 76, SEQ. ID. NO. 78, SEQ. ID. NO. 80, SEQ. ID. NO. 82, SEQ. ID. NO. 84, SEQ. ID. NO. 86, SEQ. ID. NO. 88, SEQ. ID. NO. 90, SEQ. ID. NO. 92, SEQ. ID. NO. 94, SEQ. ID. NO. 96, SEQ. ID. NO. 98, SEQ. ID. NO. 100, SEQ. ID. NO. 102, SEQ. ID. NO. 104, SEQ. ID. NO. 106, SEQ. ID. NO. 108, SEQ. ID. NO. 110, SEQ. ID. NO. 112, SEQ. ID. NO. 114, SEQ. ID. NO. 116, SEQ. ID. NO. 118, SEQ. ID. NO. 120, SEQ. ID. NO. 122, SEQ. ID. NO. 124, SEQ. ID. NO. 126, SEQ. ID. NO. 128, SEQ. ID. NO. 130, SEQ. ID. NO. 132, SEQ. ID. NO. 134, SEQ. ID. NO. 136, SEQ. ID. NO. 138, SEQ. ID. NO. 140, SEQ. ID. NO. 142, SEQ. ID. NO. 144, SEQ. ID. NO. 146, SEQ. ID. NO. 148, SEQ. ID. NO. 150, SEQ. ID. NO. 152, SEQ. ID. NO. 154, SEQ. ID. NO. 156, SEQ. ID. NO. 158, SEQ. ID. NO. 160, SEQ. ID. NO. 162, SEQ. ID. NO. 164, SEQ. ID. NO. 166, SEQ. ID. NO. 168, SEQ. ID. NO. 170, SEQ. ID. NO. 172, SEQ. ID. NO. 174, SEQ. ID. NO. 176, SEQ. ID. NO. 178, SEQ. ID. NO. 180, SEQ. ID. NO. 182, SEQ. ID. NO. 184, SEQ. ID. NO. 186, SEQ. ID. NO. 188, SEQ. ID. NO. 190, SEQ. ID. NO. 192, SEQ. ID. NO. 194, SEQ. ID. NO. 196, SEQ. ID. NO. 198, SEQ. ID. NO. 200, SEQ. ID. NO. 202, SEQ. ID. NO. 204. SEQ. ID. NO. 206, SEQ. ID. NO. 208, SEQ. ID. NO. 210, SEQ. ID. NO. 212, SEQ. ID. NO. 214, SEQ. ID. NO. 216, SEQ. ID. NO. 218, SEQ. ID. NO. 220, SEQ. ID. NO. 222, SEQ. ID. NO. 224, SEQ. ID. NO. 226, SEQ. ID. NO. 228, SEQ. ID. NO. 230, SEQ. ID. NO. 232, SEQ. ID. NO. 234, SEQ. ID. NO. 236, SEQ. ID. NO. 238, SEQ. ID. NO. 240, SEQ. ID. NO. 242, SEQ. ID. NO. 244, SEQ. ID. NO. 246, SEQ. ID. NO. 248, SEQ. ID. NO. 250, SEQ. ID. NO. 252, SEQ. ID. NO. 254, SEQ. ID. NO. 256, SEQ. ID. NO. 258, SEQ. ID. NO. 260, SEQ. ID. NO. 262, SEQ. ID. NO. 264, SEQ. ID. NO. 266, SEQ. ID. NO. 268, SEQ. ID. NO. 270, SEQ. ID. NO. 272, SEQ. ID. NO. 274, SEQ ID NO: 276, SEQ ID NO: 278, SEQ ID NO: 280, SEQ ID NO: 282, SEQ ID NO: 284, SEQ ID NO: 286, SEQ ID NO: 288, SEQ ID NO: 290, SEQ ID NO: 292, SEQ ID NO: 294, SEQ ID NO: 296, SEQ ID NO: 298, SEQ ID NO: 300, SEQ ID NO: 302, SEQ ID NO: 304, SEQ ID NO: 306, SEQ ID NO: 308, SEQ ID NO: 310, SEQ ID NO: 312, SEQ ID NO: 314, SEQ ID NO: 316, SEQ ID NO: 318, SEQ ID NO: 320, SEQ ID NO: 322, SEQ ID NO: 324, SEQ ID NO: 326, SEQ ID NO: 328, SEQ ID NO: 330, SEQ ID NO: 332, SEQ ID NO: 334, SEQ ID NO: 336, SEQ ID NO: 338, SEQ ID NO: 340, SEQ ID NO: 342, SEQ ID NO: 344, SEQ ID NO: 346, SEQ ID NO: 348, SEQ ID NO: 350, SEQ ID NO: 352, SEQ ID NO: 354, SEQ ID NO: 356, SEQ ID NO: 358, SEQ ID NO: 360, SEQ ID NO: 362, SEQ ID NO: 364, SEQ ID NO: 366, SEQ ID NO: 368, SEQ ID NO: 370, SEQ ID NO: 372, SEQ ID NO: 374, SEQ ID NO: 376, SEQ ID NO: 378, SEQ ID NO: 380, SEQ ID NO: 382, SEQ ID NO: 384, SEQ ID NO: 386, SEQ ID NO: 388, SEQ ID NO: 390, SEQ ID NO: 392, SEQ ID NO: 394, SEQ ID NO: 396, SEQ ID NO: 398, SEQ ID NO: 400, SEQ ID NO: 402, SEQ ID NO: 404, SEQ ID NO: 406, SEQ ID NO: 408, SEQ ID NO: 410, SEQ ID NO: 412, SEQ ID NO: 414, SEQ ID NO: 416, SEQ ID NO: 418, SEQ ID NO: 420, SEQ ID NO: 422, SEQ ID NO: 424, SEQ ID NO: 426, SEQ ID NO: 428, SEQ ID NO: 430, SEQ ID NO: 432, SEQ ID NO: 434, SEQ ID NO: 436, SEQ ID NO: 438, SEQ ID NO: 440, SEQ ID NO: 442, SEQ ID NO: 444, SEQ ID NO: 446, SEQ ID NO: 448, SEQ ID NO: 450, SEQ ID NO: 452, SEQ ID NO: 454, SEQ ID NO: 456, SEQ ID NO: 458, SEQ ID NO: 460, SEQ ID NO: 462, SEQ ID NO: 464, SEQ ID NO: 466, SEQ ID NO: 468, SEQ ID NO: 470, SEQ ID NO: 472, SEQ ID NO: 474, SEQ ID NO: 476, SEQ ID NO: 478, SEQ ID NO: 480, SEQ ID NO: 482, SEQ ID NO: 484, SEQ ID NO: 486, SEQ ID NO: 488, SEQ ID NO: 490, SEQ ID NO: 492, SEQ ID NO: 494, SEQ ID NO: 496, SEQ ID NO: 498, SEQ ID NO: 500, SEQ ID NO: 502, SEQ ID NO: 504, SEQ ID NO: 506, SEQ ID NO: 508, SEQ ID NO: 510 and SEQ ID NO: 512.

[0016] It is a further object of the invention to provide an isolated nucleic acid molecule comprising a nucleic acid sequence that encodes a polypeptide having an amino acid sequence which is at least 40%, more preferably at least 50%, still more preferably at least 60-70%, and still more preferably 75%, 85%, 90%, 95%, 96%, 97%, 98%, or 99% identical to an amino acid sequence selected from the group consisting of: SEQ. ID. NO. 1, SEQ. ID. NO. 3, SEQ. ID. NO. 5, SEQ. ID. NO. 7, SEQ. ID. NO. 9, SEQ. ID. NO. 11, SEQ. ID. NO. 13, SEQ. ID. NO. 15, SEQ. ID. NO. 17, SEQ. ID. NO. 19, SEQ. ID. NO. 21, SEQ. ID. NO. 23, SEQ. ID. NO. 25, SEQ. ID. NO. 27, SEQ. ID. NO. 29, SEQ. ID. NO. 31, SEQ. ID. NO. 33, SEQ. ID. NO. 35, SEQ. ID. NO. 37, SEQ. ID. NO. 39, SEQ. ID. NO. 41, SEQ. ID. NO. 43, SEQ. ID. NO. 45, SEQ. ID. NO. 47, SEQ. ID. NO. 49, SEQ. ID. NO. 51, SEQ. ID. NO. 53, SEQ. ID. NO. 55, SEQ. ID. NO. 57, SEQ. ID. NO. 59, SEQ. ID. NO. 61, SEQ. ID. NO. 63, SEQ. ID. NO. 65, SEQ. ID. NO. 67, SEQ. ID. NO. 69, SEQ. ID. NO. 71, SEQ. ID. NO. 73, SEQ. ID. NO. 75, SEQ. ID. NO. 77, SEQ. ID. NO. 79, SEQ. ID. NO. 81, SEQ. ID. NO. 83, SEQ. ID. NO. 85, SEQ. ID. NO. 87, SEQ. ID. NO. 89, SEQ. ID. NO. 91, SEQ. ID. NO. 93, SEQ. ID. NO. 95, SEQ. ID. NO. 97, SEQ. ID. NO. 99, SEQ. ID. NO. 101, SEQ. ID. NO. 103, SEQ. ID. NO. 105, SEQ. ID. NO. 107, SEQ. ID. NO. 109, SEQ. ID. NO. 111, SEQ. ID. NO. 113, SEQ. ID. NO. 115, SEQ. ID. NO. 117, SEQ. ID. NO. 119, SEQ. ID. NO. 121, SEQ. ID. NO. 123, SEQ. ID. NO. 125, SEQ. ID. NO. 127, SEQ. ID. NO. 129, SEQ. ID. NO. 131, SEQ. ID. NO. 133, SEQ. ID. NO. 135, SEQ. ID. NO. 137, SEQ. ID. NO. 139, SEQ. ID. NO. 141, SEQ. ID. NO. 143, SEQ. ID. NO. 145, SEQ. ID. NO. 147, SEQ. ID. NO. 149, SEQ. ID. NO. 151, SEQ. ID. NO. 153, SEQ. ID. NO. 155, SEQ. ID. NO. 157, SEQ. ID. NO. 159, SEQ. ID. NO. 161, SEQ. ID. NO. 163, SEQ. ID. NO. 165, SEQ. ID. NO. 167, SEQ. ID. NO. 169, SEQ. ID. NO. 171, SEQ. ID. NO. 173, SEQ. ID. NO. 175, SEQ. ID. NO. 177, SEQ. ID. NO. 179, SEQ. ID. NO. 181, SEQ. ID. NO. 183, SEQ. ID. NO. 185, SEQ. ID. NO. 187, SEQ. ID. NO. 189, SEQ. ID. NO. 191, SEQ. ID. NO. 193, SEQ. ID. NO. 195, SEQ. ID. NO. 197, SEQ. ID. NO. 199, SEQ. ID. NO. 201, SEQ. ID. NO. 203, SEQ. ID. NO. 205, SEQ. ID. NO. 207, SEQ. ID. NO. 209, SEQ. ID. NO. 211, SEQ. ID. NO. 213, SEQ. ID. NO. 215, SEQ. ID. NO. 217, SEQ. ID. NO. 219, SEQ. ID. NO. 221, SEQ. ID. NO. 223, SEQ. ID. NO. 225, SEQ. ID. NO. 227, SEQ. ID. NO. 229, SEQ. ID. NO. 231, SEQ. ID. NO. 233, SEQ. ID. NO. 235, SEQ. ID. NO. 237, SEQ. ID. NO. 239, SEQ. ID. NO. 241, SEQ. ID. NO. 243, SEQ. ID. NO. 245, SEQ. ID. NO. 247, SEQ. ID. NO. 249, SEQ. ID. NO. 251, SEQ. ID. NO. 253, SEQ. ID. NO. 255, SEQ. ID. NO. 257, SEQ. ID. NO. 259, SEQ. ID. NO. 261, SEQ. ID. NO., 263, SEQ. ID. NO., 265, SEQ. ID. NO. 267, SEQ. ID. NO. 269, SEQ. ID. NO. 271, SEQ. ID. NO. 273, SEQ. ID. NO. 275, SEQ. ID. NO. 277, SEQ. ID. NO. 279, SEQ. ID. NO. 281, SEQ. ID. NO. 283, SEQ. ID. NO. 285, SEQ. ID. NO. 287, SEQ. ID. NO. 289, SEQ. ID. NO. 291, SEQ. ID. NO. 293, SEQ. ID. NO. 295, SEQ. ID. NO. 297, SEQ. ID. NO. 299, SEQ. ID. NO. 301, SEQ. ID. NO. 303, SEQ. ID. NO. 305, SEQ. ID. NO. 307, SEQ. ID. NO. 309, SEQ. ID. NO. 311, SEQ. ID. NO. 313, SEQ. ID. NO. 315, SEQ. ID. NO. 317, SEQ. ID. NO. 319, SEQ. ID. NO. 321, SEQ. ID. NO. 323, SEQ. ID. NO. 325, SEQ. ID. NO. 327, SEQ. ID. NO. 329, SEQ. ID. NO. 331, SEQ. ID. NO. 333, SEQ. ID. NO. 335, SEQ. ID. NO. 337, SEQ. ID. NO. 339, SEQ. ID. NO. 341, SEQ. ID. NO. 343, SEQ. ID. NO. 345, SEQ. ID. NO. 347, SEQ. ID. NO. 349, SEQ. ID. NO. 351, SEQ. ID. NO. 353, SEQ. ID. NO. 355, SEQ. ID. NO. 357, SEQ. ID. NO. 359, SEQ. ID. NO. 361, SEQ. ID. NO. 363, SEQ. ID. NO. 365, SEQ. ID. NO. 367, SEQ. ID. NO. 369, SEQ ID NO: 371, SEQ. ID. NO. 373, SEQ. ID. NO. 375, SEQ. ID. NO. 377, SEQ. ID. NO. 379, SEQ. ID. NO. 381, SEQ. ID. NO. 383, SEQ. ID. NO. 385, SEQ. ID. NO. 387, SEQ. ID. NO. 389, SEQ. ID. NO. 391, SEQ. ID. NO. 393, SEQ. ID. NO. 395, SEQ. ID. NO. 397, SEQ. ID. NO. 399, SEQ. ID. NO. 401, SEQ. ID. NO. 403, SEQ. ID. NO. 405, SEQ. ID. NO. 407, SEQ. ID. NO. 409, SEQ. ID. NO. 411, SEQ. ID. NO. 413, SEQ. ID. NO. 415, SEQ. ID. NO. 417, SEQ. ID. NO. 419, SEQ. ID. NO. 421, SEQ. ID. NO. 423, SEQ. ID. NO. 425, SEQ. ID. NO. 427, SEQ. ID. NO. 429, SEQ. ID. NO. 431, SEQ. ID. NO. 433, SEQ. ID. NO. 435, SEQ. ID. NO. 437, SEQ. ID. NO. 439, SEQ. ID. NO. 441, SEQ. ID. NO. 443, SEQ. ID. NO. 445, SEQ. ID. NO. 447, SEQ. ID. NO. 449, SEQ. ID. NO. 451, SEQ. ID. NO. 453, SEQ. ID. NO. 455, SEQ. ID. NO. 457, SEQ. ID. NO. 459, SEQ. ID. NO. 461, SEQ. ID. NO. 463, SEQ. ID. NO. 465, SEQ. ID. NO. 467, SEQ. ID. NO. 469, SEQ. ID. NO. 471, SEQ. ID. NO. 473, SEQ. ID. NO. 475, SEQ. ID. NO. 477, SEQ. ID. NO. 479, SEQ. ID. NO. 481, SEQ. ID. NO. 483, SEQ. ID. NO. 485, SEQ. ID. NO. 487, SEQ. ID. NO. 489, SEQ. ID. NO. 491, SEQ. ID. NO. 493, SEQ ID NO: 495, SEQ ID NO: 497, SEQ ID NO: 499, SEQ ID NO: 501, SEQ ID NO: 503, SEQ ID NO: 505, SEQ ID NO: 507, SEQ ID NO: 509 and SEQ ID NO: 511.

[0017] It is still a further object of the invention to provide an isolated nucleic acid molecule comprising a nucleic acid sequence that encodes a fragment of a polypeptide having an amino acid sequence selected from the group consisting of: SEQ. ID. NO. 1, SEQ. ID. NO. 3, SEQ. ID. NO. 5, SEQ. ID. NO. 7, SEQ. ID. NO. 9, SEQ. ID. NO. 11, SEQ. ID. NO. 13, SEQ. ID. NO. 15, SEQ. ID. NO. 17, SEQ. ID. NO. 19, SEQ. ID. NO. 21, SEQ. ID. NO. 23, SEQ. ID. NO. 25, SEQ. ID. NO. 27, SEQ. ID. NO. 29, SEQ. ID. NO. 31, SEQ. ID. NO. 33, SEQ. ID. NO. 35, SEQ. ID. NO. 37, SEQ. ID. NO. 39, SEQ. ID. NO. 41, SEQ. ID. NO. 43, SEQ. ID. NO. 45, SEQ. ID. NO. 47, SEQ. ID. NO. 49, SEQ. ID. NO. 51, SEQ. ID. NO. 53, SEQ. ID. NO. 55, SEQ. ID. NO. 57, SEQ. ID. NO. 59, SEQ. ID. NO. 61, SEQ. ID. NO. 63, SEQ. ID. NO. 65, SEQ. ID. NO. 67, SEQ. ID. NO. 69, SEQ. ID. NO. 71, SEQ. ID. NO. 73, SEQ. ID. NO. 75, SEQ. ID. NO. 77, SEQ. ID. NO. 79, SEQ. ID. NO. 81, SEQ. ID. NO. 83, SEQ. ID. NO. 85, SEQ. ID. NO. 87, SEQ. ID. NO. 89, SEQ. ID. NO. 91, SEQ. ID. NO. 93, SEQ. ID. NO. 95, SEQ. ID. NO. 97, SEQ. ID. NO. 99, SEQ. ID. NO. 101, SEQ. ID. NO. 103, SEQ. ID. NO. 105, SEQ. ID. NO. 107, SEQ. ID. NO. 109, SEQ. ID. NO. 111, SEQ. ID. NO. 113, SEQ. ID. NO. 115, SEQ. ID. NO. 117, SEQ. ID. NO. 119, SEQ. ID. NO. 121, SEQ. ID. NO. 123, SEQ. ID. NO. 125, SEQ. ID. NO. 127, SEQ. ID. NO. 129, SEQ. ID. NO. 131, SEQ. ID. NO. 133, SEQ. ID. NO. 135, SEQ. ID. NO. 137, SEQ. ID. NO. 139, SEQ. ID. NO. 141, SEQ. ID. NO. 143, SEQ. ID. NO. 145, SEQ. ID. NO. 147, SEQ. ID. NO. 149, SEQ. ID. NO. 151, SEQ. ID. NO. 153, SEQ. ID. NO. 155, SEQ. ID. NO. 157, SEQ. ID. NO. 159, SEQ. ID. NO. 161, SEQ. ID. NO. 163, SEQ. ID. NO. 165, SEQ. ID. NO. 167, SEQ. ID. NO. 169, SEQ. ID. NO. 171, SEQ. ID. NO. 173, SEQ. ID. NO. 175, SEQ. ID. NO. 177, SEQ. ID. NO. 179, SEQ. ID. NO. 181, SEQ. ID. NO. 183, SEQ. ID. NO. 185, SEQ. ID. NO. 187, SEQ. ID. NO. 189, SEQ. ID. NO. 191, SEQ. ID. NO. 193, SEQ. ID. NO. 195, SEQ. ID. NO. 197, SEQ. ID. NO. 199, SEQ. ID. NO. 201, SEQ. ID. NO. 203, SEQ. ID. NO. 205, SEQ. ID. NO. 207, SEQ. ID. NO. 209, SEQ. ID. NO. 211, SEQ. ID. NO. 213, SEQ. ID. NO. 215, SEQ. ID. NO. 217, SEQ. ID. NO. 219, SEQ. ID. NO. 221, SEQ. ID. NO. 223, SEQ. ID. NO. 225, SEQ. ID. NO. 227, SEQ. ID. NO. 229, SEQ. ID. NO. 231, SEQ. ID. NO. 233, SEQ. ID. NO. 235, SEQ. ID. NO. 237, SEQ. ID. NO. 239, SEQ. ID. NO. 241, SEQ. ID. NO. 243, SEQ. ID. NO. 245, SEQ. ID. NO. 247, SEQ. ID. NO. 249, SEQ. ID. NO. 251, SEQ. ID. NO. 253, SEQ. ID. NO. 255, SEQ. ID. NO. 257, SEQ. ID. NO. 259, SEQ. ID. NO. 261, SEQ. ID. NO., 263, SEQ. ID. NO., 265, SEQ. ID. NO. 267, SEQ. ID. NO. 269, SEQ. ID. NO. 271, SEQ. ID. NO. 273, SEQ. ID. NO. 275, SEQ. ID. NO. 277, SEQ. ID. NO. 279, SEQ. ID. NO. 281, SEQ. ID. NO. 283, SEQ. ID. NO. 285, SEQ. ID. NO. 287, SEQ. ID. NO. 289, SEQ. ID. NO. 291, SEQ. ID. NO. 293, SEQ. ID. NO. 295, SEQ. ID. NO. 297, SEQ. ID. NO. 299, SEQ. ID. NO. 301, SEQ. ID. NO. 303, SEQ. ID. NO. 305, SEQ. ID. NO. 307, SEQ. ID. NO. 309, SEQ. ID. NO. 311, SEQ. ID. NO. 313, SEQ. ID. NO. 315, SEQ. ID. NO. 317, SEQ. ID. NO. 319, SEQ. ID. NO. 321, SEQ. ID. NO. 323, SEQ. ID. NO. 325, SEQ. ID. NO. 327, SEQ. ID. NO. 329, SEQ. ID. NO. 331, SEQ. ID. NO. 333, SEQ. ID. NO. 335, SEQ. ID. NO. 337, SEQ. ID. NO. 339, SEQ. ID. NO. 341, SEQ. ID. NO. 343, SEQ. ID. NO. 345, SEQ. ID. NO. 347, SEQ. ID. NO. 349, SEQ. ID. NO. 351, SEQ. ID. NO. 353, SEQ. ID. NO. 355, SEQ. ID. NO. 357, SEQ. ID. NO. 359, SEQ. ID. NO. 361, SEQ. ID. NO. 363, SEQ. ID. NO. 365, SEQ. ID. NO. 367, SEQ. ID. NO. 369, SEQ ID NO: 371, SEQ. ID. NO. 373, SEQ. ID. NO. 375, SEQ. ID. NO. 377, SEQ. ID. NO. 379, SEQ. ID. NO. 381, SEQ. ID. NO. 383, SEQ. ID. NO. 385, SEQ. ID. NO. 387, SEQ. ID. NO. 389, SEQ. ID. NO. 391, SEQ. ID. NO. 393, SEQ. ID. NO. 395, SEQ. ID. NO. 397, SEQ. ID. NO. 399, SEQ. ID. NO. 401, SEQ. ID. NO. 403, SEQ. ID. NO. 405, SEQ. ID. NO. 407, SEQ. ID. NO. 409, SEQ. ID. NO. 411, SEQ. ID. NO. 413, SEQ. ID. NO. 415, SEQ. ID. NO. 417, SEQ. ID. NO. 419, SEQ. ID. NO. 421, SEQ. ID. NO. 423, SEQ. ID. NO. 425, SEQ. ID. NO. 427, SEQ. ID. NO. 429, SEQ. ID. NO. 431, SEQ. ID. NO. 433, SEQ. ID. NO. 435, SEQ. ID. NO. 437, SEQ. ID. NO. 439, SEQ. ID. NO. 441, SEQ. ID. NO. 443, SEQ. ID. NO. 445, SEQ. ID. NO. 447, SEQ. ID. NO. 449, SEQ. ID. NO. 451, SEQ. ID. NO. 453, SEQ. ID. NO. 455, SEQ. ID. NO. 457, SEQ. ID. NO. 459, SEQ. ID. NO. 461, SEQ. ID. NO. 463, SEQ. ID. NO. 465, SEQ. ID. NO. 467, SEQ. ID. NO. 469, SEQ. ID. NO. 471, SEQ. ID. NO. 473, SEQ. ID. NO. 475, SEQ. ID. NO. 477, SEQ. ID. NO. 479, SEQ. ID. NO. 481, SEQ. ID. NO. 483, SEQ. ID. NO. 485, SEQ. ID. NO. 487, SEQ. ID. NO. 489, SEQ. ID. NO. 491, SEQ. ID. NO. 493, SEQ ID NO: 495, SEQ ID NO: 497, SEQ ID NO: 499, SEQ ID NO: 501, SEQ ID NO: 503, SEQ ID NO: 505, SEQ ID NO: 507, SEQ ID NO: 509 and SEQ ID NO: 511, wherein the fragment is at least 10, preferably 20, 30, 50, 70, 100, or 150 amino acids in length.

[0018] It is still a further object of the invention to provide an isolated nucleic acid molecule comprising a nucleic acid sequence that encodes a variant of said fragment, wherein there is a variation in at most 10, preferably 5, 4, 3, 2, or 1 amino acid residues.

[0019] It is still another object of the invention to provide an isolated polypeptide comprising an amino acid sequence that is at least 40%, 50%, 60%, 70%, 80%, 90%, 95%, 96%, 97%, 98%, or 99% identical to an amino acid sequence selected from the group consisting of: SEQ. ID. NO. 1, SEQ. ID. NO. 3, SEQ. ID. NO. 5, SEQ. ID. NO. 7, SEQ. ID. NO. 9, SEQ. ID. NO. 11, SEQ. ID. NO. 13, SEQ. ID. NO. 15, SEQ. ID. NO. 17, SEQ. ID. NO. 19, SEQ. ID. NO. 21, SEQ. ID. NO. 23, SEQ. ID. NO. 25, SEQ. ID. NO. 27, SEQ. ID. NO. 29, SEQ. ID. NO. 31, SEQ. ID. NO. 33, SEQ. ID. NO. 35, SEQ. ID. NO. 37, SEQ. ID. NO. 39, SEQ. ID. NO. 41, SEQ. ID. NO. 43, SEQ. ID. NO. 45, SEQ. ID. NO. 47, SEQ. ID. NO. 49, SEQ. ID. NO. 51, SEQ. ID. NO. 53, SEQ. ID. NO. 55, SEQ. ID. NO. 57, SEQ. ID. NO. 59, SEQ. ID. NO. 61, SEQ. ID. NO. 63, SEQ. ID. NO. 65, SEQ. ID. NO. 67, SEQ. ID. NO. 69, SEQ. ID. NO. 71, SEQ. ID. NO. 73, SEQ. ID. NO. 75, SEQ. ID. NO. 77, SEQ. ID. NO. 79, SEQ. ID. NO. 81, SEQ. ID. NO. 83, SEQ. ID. NO. 85, SEQ. ID. NO. 87, SEQ. ID. NO. 89, SEQ. ID. NO. 91, SEQ. ID. NO. 93, SEQ. ID. NO. 95, SEQ. ID. NO. 97, SEQ. ID. NO. 99, SEQ. ID. NO. 101, SEQ. ID. NO. 103, SEQ. ID. NO. 105, SEQ. ID. NO. 107, SEQ. ID. NO. 109, SEQ. ID. NO. 111, SEQ. ID. NO. 113, SEQ. ID. NO. 115, SEQ. ID. NO. 117, SEQ. ID. NO. 119, SEQ. ID. NO. 121, SEQ. ID. NO. 123, SEQ. ID. NO. 125, SEQ. ID. NO. 127, SEQ. ID. NO. 129, SEQ. ID. NO. 131, SEQ. ID. NO. 133, SEQ. ID. NO. 135, SEQ. ID. NO. 137, SEQ. ID. NO. 139, SEQ. ID. NO. 141, SEQ. ID. NO. 143, SEQ. ID. NO. 145, SEQ. ID. NO. 147, SEQ. ID. NO. 149, SEQ. ID. NO. 151, SEQ. ID. NO. 153, SEQ. ID. NO. 155, SEQ. ID. NO. 157, SEQ. ID. NO. 159, SEQ. ID. NO. 161, SEQ. ID. NO. 163, SEQ. ID. NO. 165, SEQ. ID. NO. 167, SEQ. ID. NO. 169, SEQ. ID. NO. 171, SEQ. ID. NO. 173, SEQ. ID. NO. 175, SEQ. ID. NO. 177, SEQ. ID. NO. 179, SEQ. ID. NO. 181, SEQ. ID. NO. 183, SEQ. ID. NO. 185, SEQ. ID. NO. 187, SEQ. ID. NO. 189, SEQ. ID. NO. 191, SEQ. ID. NO. 193, SEQ. ID. NO. 195, SEQ. ID. NO. 197, SEQ. ID. NO. 199, SEQ. ID. NO. 201, SEQ. ID. NO. 203, SEQ. ID. NO. 205, SEQ. ID. NO. 207, SEQ. ID. NO. 209, SEQ. ID. NO. 211, SEQ. ID. NO. 213, SEQ. ID. NO. 215, SEQ. ID. NO. 217, SEQ. ID. NO. 219, SEQ. ID. NO. 221, SEQ. ID. NO. 223, SEQ. ID. NO. 225, SEQ. ID. NO. 227, SEQ. ID. NO. 229, SEQ. ID. NO. 231, SEQ. ID. NO. 233, SEQ. ID. NO. 235, SEQ. ID. NO. 237, SEQ. ID. NO. 239, SEQ. ID. NO. 241, SEQ. ID. NO. 243, SEQ. ID. NO. 245, SEQ. ID. NO. 247, SEQ. ID. NO. 249, SEQ. ID. NO. 251, SEQ. ID. NO. 253, SEQ. ID. NO. 255, SEQ. ID. NO. 257, SEQ. ID. NO. 259, SEQ. ID. NO. 261, SEQ. ID. NO., 263, SEQ. ID. NO., 265, SEQ. ID. NO. 267, SEQ. ID. NO. 269, SEQ. ID. NO. 271, SEQ. ID. NO. 273, SEQ. ID. NO. 275, SEQ. ID. NO. 277, SEQ. ID. NO. 279, SEQ. ID. NO. 281, SEQ. ID. NO. 283, SEQ. ID. NO. 285, SEQ. ID. NO. 287, SEQ. ID. NO. 289, SEQ. ID. NO. 291, SEQ. ID. NO. 293, SEQ. ID. NO. 295, SEQ. ID. NO. 297, SEQ. ID. NO. 299, SEQ. ID. NO. 301, SEQ. ID. NO. 303, SEQ. ID. NO. 305, SEQ. ID. NO. 307, SEQ. ID. NO. 309, SEQ. ID. NO. 311, SEQ. ID. NO. 313, SEQ. ID. NO. 315, SEQ. ID. NO. 317, SEQ. ID. NO. 319, SEQ. ID. NO. 321, SEQ. ID. NO. 323, SEQ. ID. NO. 325, SEQ. ID. NO. 327, SEQ. ID. NO. 329, SEQ. ID. NO. 331, SEQ. ID. NO. 333, SEQ. ID. NO. 335, SEQ. ID. NO. 337, SEQ. ID. NO. 339, SEQ. ID. NO. 341, SEQ. ID. NO. 343, SEQ. ID. NO. 345, SEQ. ID. NO. 347, SEQ. ID. NO. 349, SEQ. ID. NO. 351, SEQ. ID. NO. 353, SEQ. ID. NO. 355, SEQ. ID. NO. 357, SEQ. ID. NO. 359, SEQ. ID. NO. 361, SEQ. ID. NO. 363, SEQ. ID. NO. 365, SEQ. ID. NO. 367, SEQ. ID. NO. 369, SEQ ID NO: 371, SEQ. ID. NO. 373, SEQ. ID. NO. 375, SEQ. ID. NO. 377, SEQ. ID. NO. 379, SEQ. ID. NO. 381, SEQ. ID. NO. 383, SEQ. ID. NO. 385, SEQ. ID. NO. 387, SEQ. ID. NO. 389, SEQ. ID. NO. 391, SEQ. ID. NO. 393, SEQ. ID. NO. 395, SEQ. ID. NO. 397, SEQ. ID. NO. 399, SEQ. ID. NO. 401, SEQ. ID. NO. 403, SEQ. ID. NO. 405, SEQ. ID. NO. 407, SEQ. ID. NO. 409, SEQ. ID. NO. 411, SEQ. ID. NO. 413, SEQ. ID. NO. 415, SEQ. ID. NO. 417, SEQ. ID. NO. 419, SEQ. ID. NO. 421, SEQ. ID. NO. 423, SEQ. ID. NO. 425, SEQ. ID. NO. 427, SEQ. ID. NO. 429, SEQ. ID. NO. 431, SEQ. ID. NO. 433, SEQ. ID. NO. 435, SEQ. ID. NO. 437, SEQ. ID. NO. 439, SEQ. ID. NO. 441, SEQ. ID. NO. 443, SEQ. ID. NO. 445, SEQ. ID. NO. 447, SEQ. ID. NO. 449, SEQ. ID. NO. 451, SEQ. ID. NO. 453, SEQ. ID. NO. 455, SEQ. ID. NO. 457, SEQ. ID. NO. 459, SEQ. ID. NO. 461, SEQ. ID. NO. 463, SEQ. ID. NO. 465, SEQ. ID. NO. 467, SEQ. ID. NO. 469, SEQ. ID. NO. 471, SEQ. ID. NO. 473, SEQ. ID. NO. 475, SEQ. ID. NO. 477, SEQ. ID. NO. 479, SEQ. ID. NO. 481, SEQ. ID. NO. 483, SEQ. ID. NO. 485, SEQ. ID. NO. 487, SEQ. ID. NO. 489, SEQ. ID. NO. 491, SEQ. ID. NO. 493, SEQ ID NO: 495, SEQ ID NO: 497, SEQ ID NO: 499, SEQ ID NO: 501, SEQ ID NO: 503, SEQ ID NO: 505, SEQ ID NO: 507, SEQ ID NO: 509 and SEQ ID NO: 511.

[0020] It is still a further object of the invention to provide an isolated polypeptide comprising a fragment of a polypeptide having an amino acid sequence selected from the group consisting of: SEQ. ID. NO. 1, SEQ. ID. NO. 3, SEQ. ID. NO. 5, SEQ. ID. NO. 7, SEQ. ID. NO. 9, SEQ. ID. NO. 11, SEQ. ID. NO. 13, SEQ. ID. NO. 15, SEQ. ID. NO. 17, SEQ. ID. NO. 19, SEQ. ID. NO. 21, SEQ. ID. NO. 23, SEQ. ID. NO. 25, SEQ. ID. NO. 27, SEQ. ID. NO. 29, SEQ. ID. NO. 31, SEQ. ID. NO. 33, SEQ. ID. NO. 35, SEQ. ID. NO. 37, SEQ. ID. NO. 39, SEQ. ID. NO. 41, SEQ. ID. NO. 43, SEQ. ID. NO. 45, SEQ. ID. NO. 47, SEQ. ID. NO. 49, SEQ. ID. NO. 51, SEQ. ID. NO. 53, SEQ. ID. NO. 55, SEQ. ID. NO. 57, SEQ. ID. NO. 59, SEQ. ID. NO. 61, SEQ. ID. NO. 63, SEQ. ID. NO. 65, SEQ. ID. NO. 67, SEQ. ID. NO. 69, SEQ. ID. NO. 71, SEQ. ID. NO. 73, SEQ. ID. NO. 75, SEQ. ID. NO. 77, SEQ. ID. NO. 79, SEQ. ID. NO. 81, SEQ. ID. NO. 83, SEQ. ID. NO. 85, SEQ. ID. NO. 87, SEQ. ID. NO. 89, SEQ. ID. NO. 91, SEQ. ID. NO. 93, SEQ. ID. NO. 95, SEQ. ID. NO. 97, SEQ. ID. NO. 99, SEQ. ID. NO. 101, SEQ. ID. NO. 103, SEQ. ID. NO. 105, SEQ. ID. NO. 107, SEQ. ID. NO. 109, SEQ. ID. NO. 111, SEQ. ID. NO. 113, SEQ. ID. NO. 115, SEQ. ID. NO. 117, SEQ. ID. NO. 119, SEQ. ID. NO. 121, SEQ. ID. NO. 123, SEQ. ID. NO. 125, SEQ. ID. NO. 127, SEQ. ID. NO. 129, SEQ. ID. NO. 131, SEQ. ID. NO. 133, SEQ. ID. NO. 135, SEQ. ID. NO. 137, SEQ. ID. NO. 139, SEQ. ID. NO. 141, SEQ. ID. NO. 143, SEQ. ID. NO. 145, SEQ. ID. NO. 147, SEQ. ID. NO. 149, SEQ. ID. NO. 151, SEQ. ID. NO. 153, SEQ. ID. NO. 155, SEQ. ID. NO. 157, SEQ. ID. NO. 159, SEQ. ID. NO. 161, SEQ. ID. NO. 163, SEQ. ID. NO. 165, SEQ. ID. NO. 167, SEQ. ID. NO. 169, SEQ. ID. NO. 171, SEQ. ID. NO. 173, SEQ. ID. NO. 175, SEQ. ID. NO. 177, SEQ. ID. NO. 179, SEQ. ID. NO. 181, SEQ. ID. NO. 183, SEQ. ID. NO. 185, SEQ. ID. NO. 187, SEQ. ID. NO. 189, SEQ. ID. NO. 191, SEQ. ID. NO. 193, SEQ. ID. NO. 195, SEQ. ID. NO. 197, SEQ. ID. NO. 199, SEQ. ID. NO. 201, SEQ. ID. NO. 203, SEQ. ID. NO. 205, SEQ. ID. NO. 207, SEQ. ID. NO. 209, SEQ. ID. NO. 211, SEQ. ID. NO. 213, SEQ. ID. NO. 215, SEQ. ID. NO. 217, SEQ. ID. NO. 219, SEQ. ID. NO. 221, SEQ. ID. NO. 223, SEQ. ID. NO. 225, SEQ. ID. NO. 227, SEQ. ID. NO. 229, SEQ. ID. NO. 231, SEQ. ID. NO. 233, SEQ. ID. NO. 235, SEQ. ID. NO. 237, SEQ. ID. NO. 239, SEQ. ID. NO. 241, SEQ. ID. NO. 243, SEQ. ID. NO. 245, SEQ. ID. NO. 247, SEQ. ID. NO. 249, SEQ. ID. NO. 251, SEQ. ID. NO. 253, SEQ. ID. NO. 255, SEQ. ID. NO. 257, SEQ. ID. NO. 259, SEQ. ID. NO. 261, SEQ. ID. NO., 263, SEQ. ID. NO., 265, SEQ. ID. NO. 267, SEQ. ID. NO. 269, SEQ. ID. NO. 271, SEQ. ID. NO. 273, SEQ. ID. NO. 275, SEQ. ID. NO. 277, SEQ. ID. NO. 279, SEQ. ID. NO. 281, SEQ. ID. NO. 283, SEQ. ID. NO. 285, SEQ. ID. NO. 287, SEQ. ID. NO. 289, SEQ. ID. NO. 291, SEQ. ID. NO. 293, SEQ. ID. NO. 295, SEQ. ID. NO. 297, SEQ. ID. NO. 299, SEQ. ID. NO. 301, SEQ. ID. NO. 303, SEQ. ID. NO. 305, SEQ. ID. NO. 307, SEQ. ID. NO. 309, SEQ. ID. NO. 311, SEQ. ID. NO. 313, SEQ. ID. NO. 315, SEQ. ID. NO. 317, SEQ. ID. NO. 319, SEQ. ID. NO. 321, SEQ. ID. NO. 323, SEQ. ID. NO. 325, SEQ. ID. NO. 327, SEQ. ID. NO. 329, SEQ. ID. NO. 331, SEQ. ID. NO. 333, SEQ. ID. NO. 335, SEQ. ID. NO. 337, SEQ. ID. NO. 339, SEQ. ID. NO. 341, SEQ. ID. NO. 343, SEQ. ID. NO. 345, SEQ. ID. NO. 347, SEQ. ID. NO. 349, SEQ. ID. NO. 351, SEQ. ID. NO. 353, SEQ. ID. NO. 355, SEQ. ID. NO. 357, SEQ. ID. NO. 359, SEQ. ID. NO. 361, SEQ. ID. NO. 363, SEQ. ID. NO. 365, SEQ. ID. NO. 367, SEQ. ID. NO. 369, SEQ ID NO: 371, SEQ. ID. NO. 373, SEQ. ID. NO. 375, SEQ. ID. NO. 377, SEQ. ID. NO. 379, SEQ. ID. NO. 381, SEQ. ID. NO. 383, SEQ. ID. NO. 385, SEQ. ID. NO. 387, SEQ. ID. NO. 389, SEQ. ID. NO. 391, SEQ. ID. NO. 393, SEQ. ID. NO. 395, SEQ. ID. NO. 397, SEQ. ID. NO. 399, SEQ. ID. NO. 401, SEQ. ID. NO. 403, SEQ. ID. NO. 405, SEQ. ID. NO. 407, SEQ. ID. NO. 409, SEQ. ID. NO. 411, SEQ. ID. NO. 413, SEQ. ID. NO. 415, SEQ. ID. NO. 417, SEQ. ID. NO. 419, SEQ. ID. NO. 421, SEQ. ID. NO. 423, SEQ. ID. NO. 425, SEQ. ID. NO. 427, SEQ. ID. NO. 429, SEQ. ID. NO. 431, SEQ. ID. NO. 433, SEQ. ID. NO. 435, SEQ. ID. NO. 437, SEQ. ID. NO. 439, SEQ. ID. NO. 441, SEQ. ID. NO. 443, SEQ. ID. NO. 445, SEQ. ID. NO. 447, SEQ. ID. NO. 449, SEQ. ID. NO. 451, SEQ. ID. NO. 453, SEQ. ID. NO. 455, SEQ. ID. NO. 457, SEQ. ID. NO. 459, SEQ. ID. NO. 461, SEQ. ID. NO. 463, SEQ. ID. NO. 465, SEQ. ID. NO. 467, SEQ. ID. NO. 469, SEQ. ID. NO. 471, SEQ. ID. NO. 473, SEQ. ID. NO. 475, SEQ. ID. NO. 477, SEQ. ID. NO. 479, SEQ. ID. NO. 481, SEQ. ID. NO. 483, SEQ. ID. NO. 485, SEQ. ID. NO. 487, SEQ. ID. NO. 489, SEQ. ID. NO. 491, SEQ. ID. NO. 493, SEQ ID NO: 495, SEQ ID NO: 497, SEQ ID NO: 499, SEQ ID NO: 501, SEQ ID NO: 503, SEQ ID NO: 505, SEQ ID NO: 507, SEQ ID NO: 509 and SEQ ID NO: 511, wherein the fragment is at least 40, preferably 60, 80, 100, 150, 200, or 250 amino acids in length.

[0021] It is still a further object of the invention to provide an isolated polypeptide comprising a variant of said fragment, especially naturally occurring allelic variants, the expression of which may be significant in the manner by which different persons in the human population perceive odors differently, both on a qualitative and quantitative level, wherein there is a variation in at most 10, preferably 5, 4, 3, 2, or 1 amino acid residues.

[0022] It is still another object of the invention to provide agonists, including inverse agonists, or antagonists of such ORs, or fragments or variants thereof.

[0023] It is yet another object of the invention to provide methods for representing the perception of odor and/or for predicting the perception of odor in a mammal, including in a human. Preferably, such methods may be performed by using the ORs, or fragments or variants thereof, and genes encoding such ORs, or fragments or variants thereof, disclosed herein.

[0024] It is yet another object of the invention to provide novel molecules or combinations of molecules which elicit a predetermined olfactory perception in a mammal. Such molecules or compositions can be generated by determining a value of olfactory perception in a mammal for a known molecule or combinations of molecules; determining a value of olfactory perception in a mammal for one or more unknown molecules or combinations of molecules; comparing the value of olfactory perception in a mammal for one or more unknown compositions to the value of olfactory perception in a mammal for one or more known compositions; selecting a molecule or combination of molecules that elicits a predetermined olfactory perception in a mammal; and combining two or more unknown molecules or combinations of molecules to form a molecule or combination of molecules that elicits a predetermined olfactory perception in a mammal. The combining step yields a single molecule or a combination of molecules that elicits a predetermined olfactory perception in a mammal.

[0025] It is still a further object of the invention to provide a method of screening one or more compounds for the presence of an odor detectable by a mammal, comprising: a step of contacting said one or more compounds with the disclosed ORs, fragments or variants thereof, preferably wherein the mammal is a human.

[0026] It is another object of the invention to provided a method for simulating a fragrance, comprising: for each of a plurality of ORs, or fragments of variants thereof disclosed herein, preferably human ORs, ascertaining the extent to which the OR interacts with the fragrance; and combining a plurality of compounds, each having a previously ascertained interaction with one or more of the ORs, in amounts that together provide a receptor-stimulation profile that mimics the profile for the fragrance. Interaction of a fragrance with an OR can be determined using any of the binding or reporter assays described herein. The plurality of compounds may then be combined to form a mixture. If desired, one or more of the plurality of the compounds can be combined covalently. The combined compounds substantially stimulate at least 50%, 60%, 70%, 75%, 80% or 90% or all of the receptors that are substantially stimulated by the fragrance.

[0027] In yet another aspect of the invention, a method is provided wherein a plurality of standard compounds are tested against a plurality of ORs, or fragments or variants thereof, to ascertain the extent to which the ORs each interact with each standard compound, thereby generating a receptor stimulation profile for each standard compound. These receptor stimulation profiles may then be stored in a relational database on a data storage medium. The method may further comprise providing a desired receptor-stimulation profile for a scent; comparing the desired receptor stimulation profile to the relational database; and ascertaining one or more combinations of standard compounds that most closely match the desired receptor-stimulation profile. The method may further comprise combining standard compounds in one or more of the ascertained combinations to simulate the scent.

[0028] It is a further object of the invention to provide a method for representing olfactory perception of a particular smell in a mammal, comprising: providing values X₁ to Xₙ representative of the quantitative stimulation of each of n ORs of said vertebrate, where n is greater than or equal to 4, n is greater than or equal to 12; n is greater than or equal to 24, n is greater than or equal to 48; n is greater than or equal to 72; n is greater than or equal to 96; n is greater than or equal to 120; n is greater than or equal to 144; n is greater than or equal to 168; n is greater than or equal to 192; n is greater than or equal to 216, or n is greater than or equal to 256; and generating from said values a quantitative representation of olfactory perception. The ORs may be an olfactory receptor disclosed herein, or fragments or variants thereof, the representation may constitutes a point or a volume in n-dimensional space, may constitutes a graph or a spectrum, and may constitutes a matrix of quantitative representations. Also, the providing step may comprise contacting a plurality of recombinantly produced ORs, or fragments or variants thereof, with a test composition and quantitatively measuring the interaction of said composition with said receptors.

[0029] It is yet another object of the invention to provide a method for predicting the olfactory perception in a mammal generated by one or more molecules or combinations of molecules yielding unknown olfactory perception in a mammal, comprising: providing values X₁ to Xₙ representative of the quantitative stimulation of each of n ORs of said vertebrate, where n is greater than or equal to 4 n is greater than or equal to 12; n is greater than or equal to 24, n is greater than or equal to 48; n is greater than or equal to 72; n is greater than or equal to 96; n is greater than or equal to 120; n is greater than or equal to 144; n is greater than or equal to 168; n is greater than or equal to 192; n is greater than or equal to 216, or n is greater than or equal to 256; for one or more molecules or combinations of molecules yielding known olfactory perception in a mammal; and generating from said values a quantitative representation of olfactory perception in a mammal for the one or more molecules or combinations of molecules yielding known olfactory perception in a mammal, providing values X₁ to Xₙ representative of the quantitative stimulation of each of n ORs of said vertebrate, where n is greater than or equal to 4, n is greater than or equal to 12; n is greater than or equal to 24, n is greater than or equal to 48; n is greater than or equal to 72; n is greater than or equal to 96; n is greater than or equal to 120; n is greater than or equal to 144; n is greater than or equal to 168; n is greater than or equal to 192; n is greater than or equal to 216, or n is greater than or equal to 273; for one or more molecules or combinations of molecules yielding unknown olfactory perception in a mammal; and generating from said values a quantitative representation of olfactory perception in a mammal for the one or more molecules or combinations of molecules yielding unknown olfactory perception in a mammal, and predicting the olfactory perception in a mammal generated by one or more molecules or combinations of molecules yielding unknown olfactory perception in a mammal by comparing the quantitative representation of olfactory perception in a mammal for the one or more molecules or combinations of molecules yielding unknown olfactory perception in a mammal to the quantitative representation of olfactory perception in a mammal for the one or more molecules or combinations of molecules yielding known olfactory perception in a mammal. The ORs used in this method may include an olfactory receptor, or fragment or variant thereof, disclosed herein.

### BRIEF DESCRIPTION OF THE DRAWINGS

[0030] FIG. 1 illustrates the multiple sequence alignment derived for fifty novel ORs, indicating areas of homology and presence of sequence motifs characteristic for olfactory receptors. The fifty novel human olfactory receptors (hOR) proteins described herein are designated AOLFR1 through AOLFR52. The alignment protocol used the Clustal method with PAM250 residue weight table. Amino acid sequences AOLFR2 through AOLFR52 were analyzed for alignment with the AOLFR1 amino acid sequence.

[0031] FIG. 2 illustrates the multiple sequence alignment derived for fifty novel ORs, indicating areas of homology and presence of sequence motifs characteristic for olfactory receptors. The fifty novel human olfactory receptors (hOR) proteins described herein are designated AOLFR54 through AOLFR109. The alignment protocol used the Clustal method with PAM250 residue weight table. Amino acid sequences AOLFR55 through AOLFR109 were analyzed for alignment with the AOLFR54 amino acid sequence.

[0032] FIG. 3 illustrates the multiple sequence alignment derived for fifty novel ORs, indicating areas of homology and presence of sequence motifs characteristic for olfactory receptors. The fifty novel human olfactory receptors (hOR) proteins described herein are designated AOLFR110 through AOLFR163. The alignment protocol used the Clustal method with PAM250 residue weight table. Amino acid sequences AOLFR111 through AOLFR163 were analyzed for alignment with the AOLF110 amino acid sequence.

[0033] FIG. 4 illustrates the multiple sequence alignment derived for fifty-four novel ORs, indicating areas of homology and presence of sequence motifs characteristic for olfactory receptors. The fifty-four novel human olfactory receptors (hOR) proteins described herein are designated AOLFR165 through AOLFR217. The alignment protocol used the Clustal method with PAM250 residue weight table. Amino acid sequences AOLFR166 through AOLFR217 were analyzed for alignment with the AOLFR165 amino acid sequence.

[0034] FIG. 5 illustrates the multiple sequence alignment derived for fifty-two novel ORs, indicating areas of homology and presence of sequence motifs characteristic for olfactory receptors. The fifty-two novel human olfactory receptors (hOR) proteins described herein, which are designated AOLFR218 through AOLFR328. The alignment protocol used the Clustal method with PAM250 residue weight table. Amino acid sequences AOLFR219 through AOLFR328 were analyzed for alignment with the AOLFR218 amino acid sequence.

### DETAILED DESCRIPTION OF THE INVENTION

[0035] The invention thus provides isolated nucleic acid molecules encoding olfactory-cell-specific G protein-coupled receptors (“GPCRs”), and the polypeptides they encode. These nucleic acid molecules and the polypeptides that they encode are members of the olfactory receptor family. Other members of the olfactory receptor family are disclosed in Krautwurst, et al., Cell, 95:917-26 (1998), and WO 0035274, the contents of which are herein incorporated by reference in their entireties.

[0036] According to one aspect of the invention, genes encoding over two hundred fifty distinct, novel human olfactory (odorant) receptors (also herein referred to ORs) have been identified in genome sequence databases. All of these receptor genes have been initially detected by computer DNA sequence analysis of genomic clones (unfinished High Throughput Genomic Sequence database accession numbers AB045359, AP002532, AP002533, AL365440, AC073487, AL359636, AL359955, AP002535, AB045365, AL359218, AC002555, AB045361, AL359512, AC023255, AL358773, AL357767, AL358874, AC068380, AC025283, AP002407, AC018700, AC022289, AC006313, AC002556, AC011571, AL121944, AC007194, AP001112, AC021660, AP000723, AC016856, AC018700, AP000818, AC00596, AP000916, AC011517, AP001112, AP000916, AC021427, AC021427, AC020884, AC019108, AL135841, AL133410, AF186996, AL138834, AC009237, AC025249, AC010930, AC009758, AC009642, AC009758, AC025249, AF101706, AC009642, AC025249, AC021660, AC011647, AC011711, AC09642, AC020597, AC011711, AC019088, AC022882, AC011571, AL121944, AP000435, AC012616, AC010332, AC010766, AP000743, AC021809, AC011879, AC021304, AC023226, AL160314, AC021304, AC020380, AC011904, AC004977, AC021304, AP000868, AP000825, AC023080, AC022207, AC121986, AC010814, AC018700, AC021304, AC008620, AC011537, AC010760, AC027641, AC017103, AC024729, AC024257, AC025115, AP001524, AP000916, AC010814, AL162254, AC025234, AP001521, AC026090, AC019088, AC016856, AC016787, AC009594, AC026038, AQ628489, AC025942, AL163152, AC026975, AC024654, AP001803, AP001804, AL353767, AP001884, AC026083, AC018793, AP000818, AL353894, AL049734, AL355366, AC011464, AC037472, AC036111, AC019093, AC027239, AC027522, AC009545, AC021333, AC036216, AC021935, AC022762, AL356019, AC055861, AC018375, AC072059, AC068339, AC022891, AL357039, AP002345, AC044810, AC073113, AC024399, AC023564, AL390860, AC074365, AP002826, AL359636, AL391534, AC055731, AC076959, AP002826, AC019088, AC009779, AL445307, AP002512, AP000818, AC079190) by virtue of their sequence homology to some of the known human and other mammalian olfactory receptor genes.

[0037] Alternatively, nucleic acids encoding the olfactory receptors (ORs) and polypeptides of the invention can be isolated from a variety of sources, genetically engineered, amplified, synthesized, and/or expressed recombinantly according to the methods disclosed in WO 0035374, which is herein incorporated by reference in its entirety.

[0038] These nucleic acids provide valuable probes for the identification of olfactory cells, as the nucleic acids are specifically expressed in olfactory cells. They can also serve as tools for the generation of sensory topographical maps that elucidate the relationship between olfactory cells and olfactory sensory neurons leading to olfactory centers in the brain. Furthermore, the nucleic acids and the polypeptides they encode can be used as probes to elucidate olfactory-inducted behaviors.

[0039] The invention also provides methods of screening for modulators, e.g., activators, inhibitors, stimulators, enhancers, agonists, inverse agonists and antagonists, of the ORs, or fragments or variants thereof, of the invention. Such modulators of olfactory transduction are useful for pharmacological and genetic modulation of olfactory signaling pathways. These methods of screening can be used to identify high affinity agonists and antagonists of olfactory cell activity. These modulator compounds can then be used in the food, pharmaceutical, and cosmetic industries to customize odors and fragrances.

[0040] Thus, the invention provides assays for olfactory modulation, where the ORs, or fragments or variants thereof, of the invention act as direct or indirect reporter molecules for the effect of modulators on olfactory transduction. The ORs, or fragments or variants thereof, can be used in assays, e.g., to measure changes in ion concentration, membrane potential, current flow, ion flux, transcription, signal transduction, receptor-ligand interaction, second messenger concentrations, in vitro, in vivo and ex vivo. In one embodiment, the ORs, or fragments or variants thereof, can be used as an indirect reporters via attachment to second reporter molecules, such as green fluorescent protein (see, e.g., Mistili et al., Nature Biotech., 15:961-64 (1997)). In another embodiment, the ORs, or fragments or variants thereof, can be expressed in host cells, and modulation of olfactory transduction via OR activity can be assayed by measuring changes in Ca²⁺ levels.

[0041] Methods of assaying for modulators of olfactory transduction include in vitro ligand binding assays using the ORs of the invention, or fragments or variants thereof. More particularly, such assays can use the ORs; portions thereof such as the extracellular or transmembrane domains; chimeric proteins comprising one or more of such domains; oocyte receptor expression; tissue culture cell receptor expression; transcriptional activation of the receptor; G protein binding to the receptor; ligand binding assays; voltage, membrane potential and conductance changes; ion flux assays; changes in intracellular second messengers such as cAMP and inositol triphosphate; changes in intracellular Ca²⁺ levels; and neurotransmitter release.

[0042] The invention also provides for methods of detecting olfactory nucleic acid and protein expression, allowing for the investigation of olfactory transduction regulation and specific identification of olfactory receptor cells. The ORs, fragments, and variants of the invention can also be used to generate monoclonal and polyclonal antibodies useful for identifying olfactory receptor cells. Olfactory receptor cells can be identified using techniques such as reverse transcription and amplification of mRNA, isolation of total RNA or poly A⁺ RNA, northern blotting, dot blotting, in situ hybridization, RNase protection, S1 digestion, probing DNA microchip arrays, western blots, and the like.

A. Identification and Characterization of Olfactory Receptors

[0043] The amino acid sequences of the ORs and polypeptides of the invention can be identified by putative translation of the coding nucleic acid sequences. These various amino acid sequences and the coding nucleic acid sequences may be compared to one another or to other sequences according to a number of methods.

[0044] For example, in sequence comparison, typically one sequence acts as a reference sequence, to which test sequences are compared. When using a sequence comparison algorithm, test and reference sequences are entered into a computer, subsequence coordinates are designated, if necessary, and sequence algorithm program parameters are designated. Default program parameters can be used, as described below for the BLASTN and BLASTP programs, or alternative parameters can be designated. The sequence comparison algorithm then calculates the percent sequence identities for the test sequences relative to the reference sequence, based on the program parameters.

[0045] A “comparison window,” as used herein, includes reference to a segment of any one of the number of contiguous positions selected from the group consisting of: from 20 to 600, usually about 50 to about 200, more usually about 100 to about 150 in which a sequence may be compared to a reference sequence of the same number of contiguous positions after the two sequences are optimally aligned. Methods of alignment of sequences for comparison are well known in the art. Optimal alignment of sequences for comparison can be conducted, e.g., by the local homology algorithm of Smith & Waterman, Adv. Appl. Math. 2:482 (1981), by the homology alignment algorithm of Needleman & Wunsch, J Mol. Biol. 48:443 (1970), by the search for similarity method of Pearson & Lipman, PNAS, 85:2444 (1988), by computerized implementations of these algorithms (GAP, BESTFIT, FASTA, and TFASTA in the Wisconsin Genetics Software Package, Genetics Computer Group, 575 Science Dr., Madison, Wis.), or by manual alignment and visual inspection (see, e.g., Current Protocols in Molecular Biology (Ausubel et al., eds. 1995 supplement)).

[0046] A preferred example of an algorithm that is suitable for determining percent sequence identity and sequence similarity are the BLAST and BLAST 2.0 algorithms, which are described in Altschul et al., Nuc. Acids Res. 25:3389-3402 (1977) and Altschul et al., J Mol. Biol. 215:403-410 (1990), respectively. Software for performing BLAST analyses is publicly available through the National Center for Biotechnology Information (http://www.ncbi.nlm.nih.gov/). This algorithm involves first identifying high scoring sequence pairs (HSPs) by identifying short words of length W in the query sequence, which either match or satisfy some positive-valued threshold score T when aligned with a word of the same length in a database sequence. T is referred to as the neighborhood word score threshold (Altschul et al., Altschul et al., Nuc. Acids Res. 25:3389-3402 (1977) and Altschul et al., J Mol. Biol. 215:403-410 (1990)). These initial neighborhood word hits act as seeds for initiating searches to find longer HSPs containing them. The word hits are extended in both directions along each sequence for as far as the cumulative alignment score can be increased. Cumulative scores are calculated using, for nucleotide sequences, the parameters M (reward score for a pair of matching residues; always >0) and N (penalty score for mismatching residues; always <0). For amino acid sequences, a scoring matrix is used to calculate the cumulative score. Extension of the word hits in each direction are halted when: the cumulative alignment score falls off by the quantity X from its maximum achieved value; the cumulative score goes to zero or below, due to the accumulation of one or more negative-scoring residue alignments; or the end of either sequence is reached. The BLAST algorithm parameters W, T, and X determine the sensitivity and speed of the alignment. The BLASTN program (for nucleotide sequences) uses as defaults a wordlength (W) of 11, an expectation (E) or 10, M=5, N=−4 and a comparison of both strands. For amino acid sequences, the BLASTP program uses as defaults a wordlength of 3, and expectation (E) of 10, and the BLOSUM62 scoring matrix (see Henikoff & Henikoff, PNAS, 89:10915 (1989)) alignments (B) of 50, expectation (E) of 10, M=5, N=−4, and a comparison of both strands.

[0047] Another example of a useful algorithm is PILEUP. PILEUP creates a multiple sequence alignment from a group of related sequences using progressive, pairwise alignments to show relationship and percent sequence identity. It also plots a so-called “tree” or “dendogram” showing the clustering relationships used to create the alignment (see, e.g., FIG. 2). PILEUP uses a simplification of the progressive alignment method of Feng & Doolittle, J Mol. Evol. 35:351-60 (1987). The method used is similar to the method described by Higgins & Sharp, CABIOS 5:151-153 (1989). The program can align up to 300 sequences, each of a maximum length of 5,000 nucleotides or amino acids. The multiple alignment procedure begins with the pairwise alignment of the two most similar sequences, producing a cluster of two aligned sequences. This cluster is then aligned to the next most related sequence or cluster of aligned sequences. Two clusters of sequences are aligned by a simple extension of the pairwise alignment of two individual sequences. The final alignment is achieved by a series of progressive, pairwise alignments. The program is run by designating specific sequences and their amino acid or nucleotide coordinates for regions of sequence comparison and by designating the program parameters. Using PILEUP, a reference sequence is compared to other test sequences to determine the percent sequence identity relationship using the following parameters: default gap weight (3.00), default gap length weight (0.10), and weighted end gaps. PILEUP can be obtained from the GCG sequence analysis software package, e.g., version 7. 0 (Devereaux et al., Nuc. Acids Res. 12:387-395 (1984) encoded by the genes were derived by conceptual translation of the corresponding open reading frames. Comparison of these protein sequences to all known proteins in the public sequence databases using BLASTP algorithm revealed their strong homology to the members of the mammalian olfactory receptor family, each of the odorant receptor sequences having at least 50%, and preferably at least 55%, at least 60%, at least 65%, and most preferably at least 70%, amino acid identity to at least one known member of the family.

[0048] The nucleic acid molecules of the present invention are typically intronless and encode putative OR proteins generally having lengths of approximately 290 to approximately 400 amino acid residues that contain seven transmembrane domains, as predicted by hydrophobicity plotting analysis, indicating that they belong to the G protein-coupled receptor 7-transmembrane (7TM) superfamily, which includes the subset of taste and olfactory receptors. In addition to the overall structural similarity, each of the ORs identified herein has a characteristic sequence signature of an olfactory receptor. In particular, all the identified sequences contain very close matches to the following consensus amino acid motifs (Mombaerts, 1999, Pilpel 1999): EFILL (SEQ ID NO: 513) before transmembrane domain 1, LHTPMY (SEQ ID No: 514) in intracellular loop 1, MAYDRYVAIC (SEQ ID NO: 510) at the end of transmembrane domain 3 and the beginning of intracellular loop 2, SY at the end of transmembrane domain 5, FSTCSSH (SEQ ID NO: 516) in the beginning of transmembrane domain 6, and PMLNPF (SEQ ID NO: 517) in transmembrane domain 7. Combination of all the above-mentioned structural features of the identified genes and encoded proteins strongly suggests that they represent novel members of the human olfactory receptor family.

[0049] As noted above, complete or partial sequences of numerous human and other eukaryotic olfactory receptors are currently known. The novel human receptors have amino acid sequences distinctly different from the previously known human olfactory receptors, which suggests their different specificity in odorant recognition. Therefore, these novel receptors and their genes can be used, alone or in combination with known olfactory receptors, in developing detection systems and assays for chemically distinct types of odorants not recognized by the known receptors, as well as for diagnostic and research purposes.

B. Definitions

[0050] As used herein, the following terms have the meanings ascribed to them unless specified otherwise.

[0051] “OR” refers to one or more members of a family of G protein-coupled receptors that are expressed in olfactory cells. Olfactory receptor cells can also be identified on the basis of morphology (see, e.g., Roper, supra), or by the expression of proteins specifically expressed in olfactory cells. OR family members may have the ability to act as receptors for olfactory transduction.

[0052] “OR” nucleic acids encode a family of GPCRs with seven transmembrane regions that have “G protein-coupled receptor activity,” e.g., they may bind to G proteins in response to extracellular stimuli and promote production of second messengers such as IP3, cAMP, cGMP, and Ca²⁺ via stimulation of enzymes such as phospholipase C and adenylate cyclase (for a description of the structure and function of GPCRs, see, e.g., Fong, supra, and Baldwin, supra). A single olfactory cell may contain many distinct OR polypeptides.

[0053] Topologically, certain chemosensory GPCRs have an “N-terminal domain;” “extracellular domains;” “transmembrane domains” comprising seven transmembrane regions, and corresponding cytoplasmic, and extracellular loops; “cytoplasmic domains,” and a “C-terminal domain” (see, e.g., Hoon et al, Cell, 96:541-51 (1999); Buck & Axel, Cell, 65:175-87 (1991)). These domains can be structurally identified using methods known to those of skill in the art, such as sequence analysis programs that identify hydrophobic and hydrophilic domains (see, e.g., Stryer, Biochemistry, (3rd ed. 1988); see also any of a number of Internet based sequence analysis programs, such as those found at dot.imgen.bcm.tmc.edu). Such domains are useful for making chimeric proteins and for in vitro assays of the invention, e.g., ligand binding assays.

[0054] “Extracellular domains” therefore refers to the domains of OR polypeptides that protrude from the cellular membrane and are exposed to the extracellular face of the cell. Such domains generally include the “N terminal domain” that is exposed to the extracellular face of the cell, and optionally can include portions of the extracellular loops of the transmembrane domain that are exposed to the extracellular face of the cell, i.e., the loops between transmembrane regions 2 and 3, between transmembrane regions 4 and 5, and between transmembrane regions 6 and 7.

[0055] The “N terminal domain” region starts at the N-terminus and extends to a region close to the start of the transmembrane domain. “Transmembrane domain,” which comprises the seven “transmembrane regions,” refers to the domain of OR polypeptides that lies within the plasma membrane, and may also include the corresponding cytoplasmic (intracellular) and extracellular loops. The seven transmembrane regions and extracellular and cytoplasmic loops can be identified using standard methods, as described in Kyte & Doolittle, J. Mol. Biol., 157:105-32 (1982)), or in Stryer, supra. The general secondary and tertiary structure of transmembrane domains, in particular the seven transmembrane domains of 7-transmembrane receptors such as olfactory receptors, are well known in the art. Thus, primary structure sequence can be designed or predicted based on known transmembrane domain sequences, as described in detail below. These transmembrane domains are useful for in vitro ligand-binding assays, both soluble and solid phase.

[0056] “Cytoplasmic domains” refers to the domains of OR polypeptides that face the inside of the cell, e.g., the “C terminal domain” and the intracellular loops of the transmembrane domain, e.g., the intracellular loop between transmembrane regions 1 and 2, the intracellular loop between transmembrane regions 3 and 4, and the intracellular loop between transmembrane regions 5 and 6. “C terminal domain” refers to the region that spans the end of the last transmembrane domain and the C-terminus of the protein, and which is normally located within the cytoplasm.

[0057] The term “ligand-binding region” or “ligand-binding domain” refers to sequences derived from a chemosensory receptor, particularly an olfactory receptor, that substantially incorporates at least transmembrane domains II to VII. The ligand-binding region may be capable of binding a ligand, and more particularly, an odorant.

[0058] The phrase “functional effects” in the context of assays for testing compounds that modulate OR family member mediated olfactory transduction includes the determination of any parameter that is indirectly or directly under the influence of the receptor, e.g., functional, physical and chemical effects. It includes ligand binding, changes in ion flux, membrane potential, current flow, transcription, G protein binding, GPCR phosphorylation or dephosphorylation, signal transduction, receptor-ligand interactions, second messenger concentrations (e.g., cAMP, cGMP, IP3, or intracellular Ca²⁺), in vitro, in vivo, and ex vivo and also includes other physiologic effects such increases or decreases of neurotransmitter or hormone release.

[0059] By “determining the functional effect” in the context of assays is meant assays for a compound that increases or decreases a parameter that is indirectly or directly under the influence of an OR family member, e.g., functional, physical and chemical effects. Such functional effects can be measured by any means known to those skilled in the art, e.g., changes in spectroscopic characteristics (e.g., fluorescence, absorbance, refractive index), hydrodynamic (e.g., shape), chromatographic, or solubility properties, patch clamping, voltage-sensitive dyes, whole cell currents, radioisotope efflux, inducible markers, oocyte OR gene expression; tissue culture cell OR expression; transcriptional activation of OR genes; ligand-binding assays; voltage, membrane potential and conductance changes; ion flux assays; changes in intracellular second messengers such as cAMP, cGMP, and inositol triphosphate (IP3); changes in intracellular calcium levels; neurotransmitter release, and the like.

[0060] “Inhibitors,” “activators,” and “modulators” of OR genes or proteins are used interchangeably to refer to inhibitory, activating, or modulating molecules identified using in vitro and in vivo assays for olfactory transduction, e.g., ligands, agonists, antagonists, and their homologs and mimetics. Inhibitors are compounds that, e.g., bind to, partially or totally block stimulation, decrease, prevent, delay activation, inactivate, desensitize, or down regulate olfactory transduction, e.g., antagonists. Activators are compounds that, e.g., bind to, stimulate, increase, open, activate, facilitate, enhance activation, sensitize, or up regulate olfactory transduction, e.g., agonists. Modulators include compounds that, e.g., alter the interaction of a receptor with: extracellular proteins that bind activators or inhibitor (e.g., ebnerin and other members of the hydrophobic carrier family); G proteins; kinases (e.g., homologs of rhodopsin kinase and beta adrenergic receptor kinases that are involved in deactivation and desensitization of a receptor); and arresting, which also deactivate and desensitize receptors. Modulators can include genetically modified versions of OR family members, e.g., with altered activity, as well as naturally occurring and synthetic ligands, antagonists, agonists, small chemical molecules and the like. Such assays for inhibitors and activators include, e.g., expressing OR family members in cells or cell membranes, applying putative modulator compounds, in the presence or absence of tastants, e.g., sweet tastants, and then determining the functional effects on olfactory transduction, as described above. Samples or assays comprising OR family members that are treated with a potential activator, inhibitor, or modulator are compared to control samples without the inhibitor, activator, or modulator to examine the extent of modulation. Control samples (untreated with modulators) are assigned a relative OR activity value of 100%. Inhibition of a OR is achieved when the OR activity value relative to the control is about 80%, optionally 50% or 25-0%. Activation of an OR is achieved when the OR activity value relative to the control is 110%, optionally 150%, optionally 200-500%, or 1000-3000% higher.

[0061] The terms “purified,” “substantially purified,” and “isolated” as used herein refer to the state of being free of other, dissimilar compounds with which the compound of the invention is normally associated in its natural state, so that the “purified,” “substantially purified,” and “isolated” subject comprises at least 0.5%, 1%, 5%, 10%, or 20%, and most preferably at least 50% or 75% of the mass, by weight, of a given sample. In one preferred embodiment, these terms refer to the compound of the invention comprising at least 95% of the mass, by weight, of a given sample. As used herein, the terms “purified,” “substantially purified,” and “isolated” “isolated,” when referring to a nucleic acid or protein, of nucleic acids or proteins, also refers to a state of purification or concentration different than that which occurs naturally in the mammalian, especially human, body. Any degree of purification or concentration greater than that which occurs naturally in the mammalian, especially human, body, including (1) the purification from other associated structures or compounds or (2) the association with structures or compounds to which it is not normally associated in the mammalian, especially human, body, are within the meaning of “isolated.” The nucleic acid or protein or classes of nucleic acids or proteins, described herein, may be isolated, or otherwise associated with structures or compounds to which they are not normally associated in nature, according to a variety of methods and processes known to those of skill in the art.

[0062] As used herein, the term “isolated,” when referring to a nucleic acid or polypeptide refers to a state of purification or concentration different than that which occurs naturally in the mammalian, especially human, body. Any degree of purification or concentration greater than that which occurs naturally in the body, including (1) the purification from other naturally-occurring associated structures or compounds, or (2) the association with structures or compounds to which it is not normally associated in the body are within the meaning of “isolated” as used herein. The nucleic acids or polypeptides described herein may be isolated or otherwise associated with structures or compounds to which they are not normally associated in nature, according to a variety of methods and processed known to those of skill in the art.

[0063] As used herein, the terms “amplifying” and “amplification” refer to the use of any suitable amplification methodology for generating or detecting recombinant or naturally expressed nucleic acid, as described in detail, below. For example, the invention provides methods and reagents (e.g., specific degenerate oligonucleotide primer pairs) for amplifying (e.g., by polymerase chain reaction, PCR) naturally expressed (e.g., genomic or mRNA) or recombinant (e.g., cDNA) nucleic acids of the invention (e.g., tastant-binding sequences of the invention) in vivo or in vitro.

[0064] The term “7-transmembrane receptor” means a polypeptide belonging to a superfamily of transmembrane proteins that have seven domains that span the plasma membrane seven times (thus, the seven domains are called “transmembrane” or “TM” domains TM I to TM VII). The families of olfactory and certain taste receptors each belong to this super-family. 7-transmembrane receptor polypeptides have similar and characteristic primary, secondary and tertiary structures, as discussed in further detail below.

[0065] The term “library” means a preparation that is a mixture of different nucleic acid or polypeptide molecules, such as the library of recombinantly generated chemosensory, particularly olfactory receptor ligand-binding domains generated by amplification of nucleic acid with degenerate primer pairs, or an isolated collection of vectors that incorporate the amplified ligand-binding domains, or a mixture of cells each randomly transfected with at least one vector encoding an olfactory receptor.

[0066] The term “nucleic acid” or “nucleic acid sequence” refers to a deoxy-ribonucleotide or ribonucleotide oligonucleotide in either single- or double-stranded form. The term encompasses nucleic acids, i.e., oligonucleotides, containing known analogs of natural nucleotides. The term also encompasses nucleic-acid-like structures with synthetic backbones (see e.g., Oligonucleotides and Analogies, a Practical Approach, ed. F. Eckstein, Oxford Univ. Press (1991); Antisense Strategies, Annals of the N.Y. Acad. of Sci., Vol. 600, Eds. Baserga et al. (NYAS 1992); Milligan J. Med. Chem. 36:1923-1937 (1993); Antisense Research and Applications (1993, CRC Press), WO 97/03211; WO 96/39154; Mata, Toxicol. Appl. Pharmacol. 144:189-197 (1997); Strauss-Soukup, Biochemistry 36:8692-8698 (1997); Samstag, Antisense Nucleic Acid Drug Dev, 6:153-156 (1996)).

[0067] Unless otherwise indicated, a particular nucleic acid sequence also implicitly encompasses conservatively modified variants thereof (e.g., degenerate codon substitutions) and complementary sequences, as well as the sequence explicitly indicated. Specifically, degenerate codon substitutions may be achieved by generating, e.g., sequences in which the third position of one or more selected codons is substituted with mixed-base and/or deoxyinosine residues (Batzer et al., Nucleic Acid Res., 19:5081 (1991); Ohtsuka et al., J. Biol. Chem., 260:2605-08 (1985); Rossolini et al., Mol. Cell. Probes, 8:91-98 (1994)). The term nucleic acid is used interchangeably with gene, cDNA, mRNA, oligonucleotide, and polynucleotide.

[0068] The terms “polypeptide,” “peptide” and “protein” are used interchangeably herein to refer to a polymer of amino acid residues. The terms apply to amino acid polymers in which one or more amino acid residue is an artificial chemical mimetic of a corresponding naturally occurring amino acid, as well as to naturally occurring amino acid polymers and non-naturally occurring amino acid polymer.

[0069] The term “plasma membrane translocation domain” or simply “translocation domain” means a polypeptide domain that, when incorporated into the amino terminus of a polypeptide coding sequence, can with great efficiency “chaperone” or “translocate” the hybrid (“fusion”) protein to the cell plasma membrane. For instance, a “translocation domain” may be derived from the amino terminus of the bovine rhodopsin receptor polypeptide. In one embodiment, the translocation domain may be functionally equivalent to an exemplary translocation domain (5′-MNGTEGPNFYVPFSNKTGVV; SEQ ID NO: 518). However, rhodopsin from any mammal may be used, as can other translocation facilitating sequences. Thus, the translocation domain is particularly efficient in translocating 7-transmembrane fusion proteins to the plasma membrane, and a protein (e.g., an olfactory receptor polypeptide) comprising an amino terminal translocating domain will be transported to the plasma membrane more efficiently than without the domain. However, if the N-terminal domain of the polypeptide is active in binding, the use of other translocation domains may be preferred.

[0070] “Functional equivalency” means the domain's ability and efficiency in translocating newly translated proteins to the plasma membrane as efficiently as exemplary SEQ ID NO: 518 under similar conditions; relatively efficiencies an be measured (in quantitative terms) and compared, as described herein. Domains falling within the scope of the invention can be determined by routine screening for their efficiency in translocating newly synthesized polypeptides to the plasma membrane in a cell (mammalian, Xenopus, and the like) with the same efficiency as the twenty amino acid long translocation domain SEQ ID NO: 518, as described in detail below.

[0071] The “translocation domain,” “ligand-binding domain”, and chimeric receptors compositions described herein also include “analogs,” or “conservative variants” and “mimetics” (“peptidomimetics”) with structures and activity that substantially correspond to the exemplary sequences. Thus, the terms “conservative variant” or “analog” or “mimetic” refer to a polypeptide which has a modified amino acid sequence, such that the change(s) do not substantially alter the polypeptide's (the conservative variant's) structure and/or activity, as defined herein. These include conservatively modified variations of an amino acid sequence, i.e., amino acid substitutions, additions or deletions of those residues that are not critical for protein activity, or substitution of amino acids with residues having similar properties (e.g., acidic, basic, positively or negatively charged, polar or non-polar, etc.) such that the substitutions of even critical amino acids does not substantially alter structure and/or activity. Conservative substitution tables providing functionally similar amino acids are well known in the art.

[0072] More particularly, “conservatively modified variants” applies to both amino acid and nucleic acid sequences. With respect to particular nucleic acid sequences, conservatively modified variants refers to those nucleic acids which encode identical or essentially identical amino acid sequences, or where the nucleic acid does not encode an amino acid sequence, to essentially identical sequences. Because of the degeneracy of the genetic code, a large number of functionally identical nucleic acids encode any given protein.

[0073] For instance, the codons GCA, GCC, GCG and GCU all encode the amino acid alanine. Thus, at every position where an alanine is specified by a codon, the codon can be altered to any of the corresponding codons described without altering the encoded polypeptide.

[0074] Such nucleic acid variations are “silent variations,” which are one species of conservatively modified variations. Every nucleic acid sequence herein which encodes a polypeptide also describes every possible silent variation of the nucleic acid. One of skill will recognize that each codon in a nucleic acid (except AUG, which is ordinarily the only codon for methionine, and TGG, which is ordinarily the only codon for tryptophan) can be modified to yield a functionally identical molecule. Accordingly, each silent variation of a nucleic acid which encodes a polypeptide is implicit in each described sequence.

[0075] Conservative substitution tables providing functionally similar amino acids are well known in the art. For example, one exemplary guideline to select conservative substitutions includes (original residue followed by exemplary substitution): ala/gly or ser; arg/lys; asn/gln or his; asp/glu; cys/ser; gln/asn; gly/asp; gly/ala or pro; his/asn or gln; ile/leu or val; leu/ile or val; lys/arg or gln or glu; met/leu or tyr or ile; phe/met or leu or tyr; ser/thr; thr/ser; trp/tyr; tyr/trp or phe; val/ile or leu. An alternative exemplary guideline uses the following six groups, each containing amino acids that are conservative substitutions for one another: 1) Alanine (A), Serine (S), Threonine (T); 2) Aspartic acid (D), Glutamic acid (E); 3) Asparagine (N), Glutamine (Q); 4) Arginine (R), Lysine (I); 5) Isoleucine (I), Leucine (L), Methionine (M), Valine (V); and 6) Phenylalanine (F), Tyrosine (Y), Tryptophan (W); (see also, e.g., Creighton, Proteins, W. H. Freeman and Company (1984); Schultz and Schimer, Principles of Protein Structure, Springer-Verlag (1979)). One of skill in the art will appreciate that the above-identified substitutions are not the only possible conservative substitutions. For example, for some purposes, one may regard all charged amino acids as conservative substitutions for each other whether they are positive or negative. In addition, individual substitutions, deletions or additions that alter, add or delete a single amino acid or a small percentage of amino acids in an encoded sequence can also be considered “conservatively modified variations.”

[0076] The terms “mimetic” and “peptidomimetic” refer to a synthetic chemical compound that has substantially the same structural and/or functional characteristics of the polypeptides, e.g., translocation domains, ligand-binding domains, or chimeric receptors of the invention. The mimetic can be either entirely composed of synthetic, non-natural analogs of amino acids, or may be a chimeric molecule of partly natural peptide amino acids and partly non-natural analogs of amino acids. The mimetic can also incorporate any amount of natural amino acid conservative substitutions as long as such substitutions also do not substantially alter the mimetic's structure and/or activity.

[0077] As with polypeptides of the invention which are conservative variants, routine experimentation will determine whether a mimetic is within the scope of the invention, i.e., that its structure and/or function is not substantially altered. Polypeptide mimetic compositions can contain any combination of non-natural structural components, which are typically from three structural groups: a) residue linkage groups other than the natural amide bond (“peptide bond”) linkages; b) non-natural residues in place of naturally occurring amino acid residues; or c) residues which induce secondary structural mimicry, i.e., to induce or stabilize a secondary structure, e.g., a beta turn, gamma turn, beta sheet, alpha helix conformation, and the like. A polypeptide can be characterized as a mimetic when all or some of its residues are joined by chemical means other than natural peptide bonds. Individual peptidomimetic residues can be joined by peptide bonds, other chemical bonds or coupling means, such as, e.g., glutaraldehyde, N-hydroxysuccinimide esters, bifunctional maleimides, N,N′-dicyclohexylcarbodiimide (DCC) or N,N′-diisopropylcarbodiimide (DIC). Linking groups that can be an alternative to the traditional amide bond (“peptide bond”) linkages include, e.g., ketomethylene (e.g., —C(═O)—CH₂— for —C(═O)'NH—), aminomethylene (CH₂—NH), ethylene, olefin (CH═CH), ether (CH₂—O), thioether (CH₂—S), tetrazole (CN₄), thiazole, retroamide, thioamide, or ester (see, e.g., Spatola, Chemistry and Biochemistry of Amino Acids, Peptides and Proteins, 7:267-357, “Peptide Backbone Modifications,” Marcell Dekker, N.Y. (1983)). A polypeptide can also be characterized as a mimetic by containing all or some non-natural residues in place of naturally occurring amino acid residues; non-natural residues are well described in the scientific and patent literature.

[0078] A “label” or a “detectable moiety” is a composition detectable by spectroscopic, photochemical, biochemical, immunochemical, or chemical means. For example, useful labels include ³²P, fluorescent dyes, electron-dense reagents, enzymes (e.g., as commonly used in an ELISA), biotin, digoxigenin, or haptens and proteins which can be made detectable, e.g., by incorporating a radiolabel into the peptide or used to detect antibodies specifically reactive with the peptide.

[0079] A “labeled nucleic acid probe or oligonucleotide” is one that is bound, either covalently, through a linker or a chemical bond, or noncovalently, through ionic, van der Waals, electrostatic, or hydrogen bonds to a label such that the presence of the probe may be detected by detecting the presence of the label bound to the probe.

[0080] As used herein a “nucleic acid probe or oligonucleotide” is defined as a nucleic acid capable of binding to a target nucleic acid of complementary sequence through one or more types of chemical bonds, usually through complementary base pairing, usually through hydrogen bond formation. As used herein, a probe may include natural (i.e., A, G, C, or T) or modified bases (7-deazaguanosine, inosine, etc.). In addition, the bases in a probe may be joined by a linkage other than a phosphodiester bond, so long as it does not interfere with hybridization. Thus, for example, probes may be peptide nucleic acids in which the constituent bases are joined by peptide bonds rather than phosphodiester linkages. It will be understood by one of skill in the art that probes may bind target sequences lacking complete complementarity with the probe sequence depending upon the stringency of the hybridization conditions. The probes are optionally directly labeled as with isotopes, chromophores, lumiphores, chromogens, or indirectly labeled such as with biotin to which a streptavidin complex may later bind. By assaying for the presence or absence of the probe, one can detect the presence or absence of the select sequence or subsequence.

[0081] The term “heterologous” when used with reference to portions of a nucleic acid indicates that the nucleic acid comprises two or more subsequences that are not found in the same relationship to each other in nature. For instance, the nucleic acid is typically recombinantly produced, having two or more sequences from unrelated genes arranged to make a new functional nucleic acid, e.g., a promoter from one source and a coding region from another source. Similarly, a heterologous protein indicates that the protein comprises two or more subsequences that are not found in the same relationship to each other in nature (e.g., a fusion protein).

[0082] A “promoter” is defined as an array of nucleic acid sequences that direct transcription of a nucleic acid. As used herein, a promoter includes necessary nucleic acid sequences near the start site of transcription, such as, in the case of a polymerase II type promoter, a TATA element. A promoter also optionally includes distal enhancer or repressor elements, which can be located as much as several thousand base pairs from the start site of transcription. A “constitutive” promoter is a promoter that is active under most environmental and developmental conditions. An “inducible” promoter is a promoter that is active under environmental or developmental regulation. The term “operably linked” refers to a functional linkage between a nucleic acid expression control sequence (such as a promoter, or array of transcription factor binding sites) and a second nucleic acid sequence, wherein the expression control sequence directs transcription of the nucleic acid corresponding to the second sequence.

[0083] As used herein, “recombinant” refers to a polynucleotide synthesized or otherwise manipulated in vitro (e.g., “recombinant polynucleotide”), to methods of using recombinant polynucleotides to produce gene products in cells or other biological systems, or to a polypeptide (“recombinant protein”) encoded by a recombinant polynucleotide. “Recombinant means” also encompass the ligation of nucleic acids having various coding regions or domains or promoter sequences from different sources into an expression cassette or vector for expression of, e.g., inducible or constitutive expression of a fusion protein comprising a translocation domain of the invention and a nucleic acid sequence amplified using a primer of the invention.

[0084] The phrase “selectively (or specifically) hybridizes to” refers to the binding, duplexing, or hybridizing of a molecule only to a particular nucleotide sequence under stringent hybridization conditions when that sequence is present in a complex mixture (e.g., total cellular or library DNA or RNA).

[0085] The phrase “stringent hybridization conditions” refers to conditions under which a probe will hybridize to its target subsequence, typically in a complex mixture of nucleic acid, but to no other sequences. Stringent conditions are sequence-dependent and will be different in different circumstances. Longer sequences hybridize specifically at higher temperatures. An extensive guide to the hybridization of nucleic acids is found in Tijssen, Techniques in Biochemistry and Molecular Biology—Hybridisation with Nucleic Probes, “Overview of principles of hybridization and the strategy of nucleic acid assays” (1993). Generally, stringent conditions are selected to be about 5-10° C. lower than the thermal melting point (Tm) for the specific sequence at a defined ionic strength pH. The Tm is the temperature (under defined ionic strength, pH, and nucleic concentration) at which 50% of the probes complementary to the target hybridize to the target sequence at equilibrium (as the target sequences are present in excess, at Tm, 50% of the probes are occupied at equilibrium). Stringent conditions will be those in which the salt concentration is less than about 1.0 M sodium ion, typically about 0.01 to 1.0 M sodium ion concentration (or other salts) at pH 7.0 to 8.3 and the temperature is at least about 30° C. for short probes (e.g., 10 to 50 nucleotides) and at least about 60° C. for long probes (e.g., greater than 50 nucleotides). Stringent conditions may also be achieved with the addition of destabilizing agents such as formamide. For selective or specific hybridization, a positive signal is at least two times background, optionally 10 times background hybridization. Exemplary stringent hybridization conditions can be as following: 50% formamide, 5×SSC, and 1% SDS, incubating at 42° C., or, 5×SSC, 1% SDS, incubating at 65° C., with wash in 0.2×SSC, and 0.1 % SDS at 65° C. Such hybridizations and wash steps can be carried out for, e.g., 1, 2, 5, 10, 15, 30, 60; or more minutes.

[0086] Nucleic acids that do not hybridize to each other under stringent conditions are still substantially related if the polypeptides that they encode are substantially related. This occurs, for example, when a copy of a nucleic acid is created using the maximum codon degeneracy permitted by the genetic code. In such cases, the nucleic acids typically hybridize under moderately stringent hybridization conditions. Exemplary “moderately stringent hybridization conditions” include a hybridization in a buffer of 40% formamide, 1 M NaCl, 1% SDS at 37° C., and a wash in 1×SSC at 45° C. Such hybridizations and wash steps can be carried out for, e.g., 1, 2, 5, 10, 15, 30, 60, or more minutes. A positive hybridization is at least twice background. Those of ordinary skill will readily recognize that alternative hybridization and wash conditions can be utilized to provide conditions of similar stringency.

[0087] “Antibody” refers to a polypeptide comprising a framework region from an immunoglobulin gene or fragments thereof that specifically binds and recognizes an antigen. The recognized immunoglobulin genes include the kappa, lambda, alpha, gamma, delta, epsilon, and mu constant region genes, as well as the myriad immunoglobulin variable region genes. Light chains are classified as either kappa or lambda. Heavy chains are classified as gamma, mu, alpha, delta, or epsilon, which in turn define the immunoglobulin classes, IgG, IgM, IgA, IgD and IgE, respectively.

[0088] An exemplary immunoglobulin (antibody) structural unit comprises a tetramer. Each tetramer is composed of two identical pairs of polypeptide chains, each pair having one “light” (about 25 kDa) and one “heavy” chain (about 50-70 kDa). The N-terminus of each chain defines a variable region of about 100 to 110 or more amino acids primarily responsible for antigen recognition. The terms variable light chain (VL) and variable heavy chain (VH) refer to these light and heavy chains respectively.

[0089] A “chimeric antibody” is an antibody molecule in which (a) the constant region, or a portion thereof, is altered, replaced or exchanged so that the antigen binding site (variable region) is linked to a constant region of a different or altered class, effector function and/or species, or an entirely different molecule which confers new properties to the chimeric antibody, e.g., an enzyme, toxin, hormone, growth factor, drug, etc.; or (b) the variable region, or a portion thereof, is altered, replaced or exchanged with a variable region having a different or altered antigen specificity.

[0090] An “anti-OR” antibody is an antibody or antibody fragment that specifically binds a polypeptide encoded by a OR gene, cDNA, or a subsequence thereof.

[0091] The term “immunoassay” is an assay that uses an antibody to specifically bind an antigen. The immunoassay is characterized by the use of specific binding properties of a particular antibody to isolate, target, and/or quantify the antigen.

[0092] The phrase “specifically (or selectively) binds” to an antibody or, “specifically (or selectively) immunoreactive with,” when referring to a protein or peptide, refers to a binding reaction that is determinative of the presence of the protein in a heterogeneous population of proteins and other biologics. Thus, under designated immunoassay conditions, the specified antibodies bind to a particular protein at least two times the background and do not substantially bind in a significant amount to other proteins present in the sample. Specific binding to an antibody under such conditions may require an antibody that is selected for its specificity for a particular protein. For example, polyclonal antibodies raised to an OR family member from specific species such as rat, mouse, or human can be selected to obtain only those polyclonal antibodies that are specifically immunoreactive with the OR polypeptide or an immunogenic portion thereof and not with other proteins, except for orthologs or polymorphic variants and alleles of the OR polypeptide. This selection may be achieved by subtracting out antibodies that cross-react with OR molecules from other species or other OR molecules. Antibodies can also be selected that recognize only OR GPCR family members but not GPCRs from other families. A variety of immunoassay formats may be used to select antibodies specifically immunoreactive with a particular protein. For example, solid-phase ELISA immunoassays are routinely used to select antibodies specifically immunoreactive with a protein (see, e.g., Harlow & Lane, Antibodies, A Laboratory Manual, (1988), for a description of immunoassay formats and conditions that can be used to determine specific immunoreactivity). Typically a specific or selective reaction will be at least twice background signal or noise and more typically more than 10 to 100 times background.

[0093] The phrase “selectively associates with” refers to the ability of a nucleic acid to “selectively hybridize” with another as defined above, or the ability of an antibody to “selectively (or specifically) bind to a protein, as defined above.

[0094] The term “expression vector” refers to any recombinant expression system for the purpose of expressing a nucleic acid sequence of the invention in vitro or in vivo, constitutively or inducibly, in any cell, including prokaryotic, yeast, fungal, plant, insect or mammalian cell. The term includes linear or circular expression systems. The term includes expression systems that remain episomal or integrate into the host cell genome. The expression systems can have the ability to self-replicate or not, i.e., drive only transient expression in a cell. The term includes recombinant expression “cassettes which contain only the minimum elements needed for transcription of the recombinant nucleic acid.

[0095] By “host cell” is meant a cell that contains an expression vector and supports the replication or expression of the expression vector. Host cells may be prokaryotic cells such as E. toll, or eukaryotic cells such as yeast, insect, amphibian, or mammalian cells such as CHO, HeLa, HEK-293, and the like, e.g., cultured cells, explants, and cells in vivo.

C. Isolation and Expression of Olfactory Receptors

[0096] Isolation and expression of the ORs, or fragments or variants thereof, of the invention can be performed as described below. PCR primers can be used for the amplification of nucleic acids encoding olfactory receptor ligand-binding regions and libraries of these nucleic acids can thereby be generated. Libraries of expression vectors can then be used to infect or transfect host cells for the functional expression of these libraries. These genes and vectors can be made and expressed in vitro or in vivo. One of skill will recognize that desired phenotypes for altering and controlling nucleic acid expression can be obtained by modulating the expression or activity of the genes and nucleic acids (e.g., promoters, enhancers and the like) within the vectors of the invention. Any of the known methods described for increasing or decreasing expression or activity can be used. The invention can be practiced in conjunction with any method or protocol known in the art, which are well described in the scientific and patent literature.

[0097] The nucleic acid sequences of the invention and other nucleic acids used to practice this invention, whether RNA, cDNA, genomic DNA, vectors, viruses or hybrids thereof, may be isolated from a variety of sources, genetically engineered, amplified, and/or expressed recombinantly. Any recombinant expression system can be used, including, in addition to mammalian cells, e.g., bacterial, yeast, insect or plant systems.

[0098] Alternatively, these nucleic acids can be synthesized in vitro by well-known chemical synthesis techniques, as described in, e.g., Carruthers, Cold Spring Harbor Symp. Quant. Biol. 47:411-418 (1982); Adams, Am. Chem. Soc. 105:661 (1983); Belousov, Nucleic Acids Res. 25:3440-3444 (1997); Frenkel, Free Radic. Biol. Med. 19:373-380 (1995); Blommers, Biochemistry 33:7886-7896 (1994); Narang, Meth. Enzymol. 68:90 (1979); Brown, Meth. Enzymol. 68:109 (1979); Beaucage, Tetra. Lett. 22:1859 (1981); U.S. Pat. No. 4,458,066. Double-stranded DNA fragments may then be obtained either by synthesizing the complementary strand and annealing the strands together under appropriate conditions, or by adding the complementary strand using DNA polymerase with an appropriate primer sequence.

[0099] Techniques for the manipulation of nucleic acids, such as, for example, for generating mutations in sequences, subcloning, labeling probes, sequencing, hybridization and the like are well described in the scientific and patent literature. See, e.g., Sambrook, ed., Molecular Cloning: a Laboratory manual (2nd ed.), Vols. 1-3, Cold Spring Harbor Laboratory (1989); Current Protocols in Molecular Biology, Ausubel, ed. John Wiley & Sons, Inc., New York (1997); Laboratory Techniques in Biochemistry and Molecular Biology: Hybridization With Nucleic Acid Probes, Part I, Theory and Nucleic Acid Preparation, Tijssen, ed. Elsevier, N.Y. (1993).

[0100] Nucleic acids, vectors, capsids, polypeptides, and the like can be analyzed and quantified by any of a number of general means well known to those of skill in the art. These include, e.g., analytical biochemical methods such as NMR, spectrophotometry, radiography, electrophoresis, capillary electrophoresis, high performance liquid chromatography (HPLC), thin layer chromatography (TLC), and hyperdiffusion chromatography, various immunological methods, e.g., fluid or gel precipitin reactions, immunodiffusion, immunoelectrophoresis, radioimmunoassays (RIAs), enzyme-linked immunosorbent assays (ELISAs), immuno-fluorescent assays, Southern analysis, Northern analysis, dot-blot analysis, gel electrophoresis (e.g., SDS-PAGE), RT-PCR, quantitative PCR, other nucleic acid or target or signal amplification methods, radiolabeling, scintillation counting, and affinity chromatography.

[0101] Oligonucleotide primers are used to amplify nucleic acid encoding an olfactory receptor ligand-binding region. The nucleic acids described herein can also be cloned or measured quantitatively using amplification techniques. Using exemplary degenerate primer pair sequences, (see below), the skilled artisan can select and design suitable oligonucleotide amplification primers. Amplification methods are also well known in the art, and include, e.g., polymerase chain reaction, PCR (PCR Protocols, a Guide to Methods and Applications, ed. Innis. Academic Press, N.Y. (1990) and PCR Strategies, ed. Innis, Academic Press, Inc., N.Y. (1995), ligase chain reaction (LCR) (see, e.g., Wu, Genomics 4:560 (1989); Landegren, Science 241:1077,(1988); Barringer, Gene 89:117 (1990)); transcription amplification (see, e.g., Kwoh, PNAS, 86:1173 (1989)); and, self-sustained sequence replication (see, e.g., Guatelli, PNAS, 87:1874 (1990)); Q Beta replicase amplification (see, e.g., Smith, J. Clin. Microbiol. 35:1477-1491 (1997)); automated Q-beta replicase amplification assay (see, e.g., Burg, Mol. Cell. Probes 10:257-271 (1996)) and other RNA polymerase mediated techniques (e.g., NASBA, Cangene, Mississauga, Ontario); see also Berger, Methods Enzymol. 152:307-316 (1987); Sambrook; Ausubel, U.S. Pat. Nos. 4,683,195 and 4,683,202; Sooknanan, Biotechnology 13:563-564 (1995).

[0102] Once amplified, the nucleic acids, either individually or as libraries, may be cloned according to methods known in the art, if desired, into any of a variety of vectors using routine molecular biological methods; methods for cloning in vitro amplified nucleic acids are described, e.g., U.S. Pat. No. 5,426,039. To facilitate cloning of amplified sequences, restriction enzyme sites can be “built into” the PCR primer pair. For example, Pst I and Bsp E1 sites were designed into the exemplary primer pairs of the invention. These particular restriction sites have a sequence that, when ligated, are “in-frame” with respect to the 7-membrane receptor “donor” coding sequence into which they are spliced (the ligand-binding region coding sequence is internal to the 7-membrane polypeptide, thus, if it is desired that the construct be translated downstream of a restriction enzyme splice site, out of frame results should be avoided; this may not be necessary if the inserted ligand-binding domain comprises substantially most of the transmembrane VII region). The primers can be designed to retain the original sequence of the “donor” 7-membrane receptor (the Pst I and Bsp E1 sequence in he primers of the invention generate an insert that, when ligated into the Pst I/Bsp E1 cut vector, encode residues found in the “donor” mouse olfactory receptor M4 sequence). Alternatively, the primers can encode amino acid residues that are conservative substitutions (e.g., hydrophobic for hydrophobic residue, see above discussion) or functionally benign substitutions (e.g., do not prevent plasma membrane insertion, cause cleavage by peptidase, cause abnormal folding of receptor, and the like).

[0103] The primer pairs are designed to selectively amplify ligand-binding regions of olfactory receptor proteins. These domain regions may vary for different ligands, and more particularly odorants; thus, what may be a minimal binding region for one ligand, and more particularly odorants, may be too limiting for a second potential ligand. Thus, domain regions of different sizes comprising different domain structures may be amplified; for example, transmembrane (TM) domains II through VII, III through VII, III through VI or II through VI, or variations thereof (e.g., only a subsequence of a particular domain, mixing the order of the domains, and the like), of a 7-transmembrane OR.

[0104] As domain structures and sequence of many 7-membrane proteins, particularly olfactory receptors, are known, the skilled artisan can readily select domain-flanking and internal domain sequences as model sequences to design degenerate amplification primer pairs. For example, a nucleic acid sequence encoding domain regions II through VII can be generated by PCR amplification using a primer pair. To amplify a nucleic acid comprising transmembrane domain I (TM I) sequence, a degenerate primer can be designed from a nucleic acid that encodes the amino acid sequence LFLLYL3′ (SEQ ID NO: 519). Such a degenerate primer can be used to generate a binding domain incorporating TM I through TM III, TM I through TM IV, TM I through TM V, TM I through TM VI or TM I through TM VII).

[0105] To amplify a nucleic acid comprising a transmembrane domain III (TM III) sequence, a degenerate primer (of at least about 17 residues) can be designed from a nucleic acid that encodes the amino acid sequence M(A/G)(Y/F)DRYVAI 3′ (SEQ ID NO: 520) (encoded by a nucleic acid sequence such as 5′-ATGG(G/C)CT(A/T)TGACCG(C/A/T)T(AT)(C/T)GT-3′ (SEQ ID NO: 521)). Such a degenerate primer can be used to generate a binding domain incorporating TM III through TM IV, TM III through TM V, TM III through TM VI or TM III through TM VII.

[0106] To amplify transmembrane domain VI (TM VI) sequence, a degenerate primer (of at least about 17 residues) can be designed from nucleic acid encoding an amino acid sequence TC(G/A)SHL (SEQ ID NO: 522), encoded by a sequence such as 5′-AG(G/A)TGN(G/C)(T/A)N(G/C)C(G/A)CANGT-3′) 3′ (SEQ ID NO: 522). Such a degenerate primer can be used to generate a binding domain incorporating TM I through TM VI, TM II through TM VI, TM III through TM VI or TM IV through TM VI).

[0107] Paradigms to design degenerate primer pairs are well known in the art. For example, a COnsensus-DEgenerate Hybrid Oligonucleotide Primer (CODEHOP) (SEQ ID NO: 523) strategy computer program is accessible as http://blocks.fhcrc.org/codehop.html, and is directly linked from the BlockMaker multiple sequence alignment site for hybrid primer prediction beginning with a set of related protein sequences, as known olfactory receptor ligand-binding regions (see, e.g., Rose, Nucleic Acids Res. 26:1628-1635 (1998); Singh, Biotechniques, 24:318-19 (1998)).

[0108] Means to synthesize oligonucleotide primer pairs are well known in the art. “Natural” base pairs or synthetic base pairs can be used. For example, use of artificial nucleobases offers a versatile approach to manipulate primer sequence and generate a more complex mixture of amplification products. Various families of artificial nucleobases are capable of assuming multiple hydrogen bonding orientations through internal bond rotations to provide a means for degenerate molecular recognition. Incorporation of these analogs into a single position of a PCR primer allows for generation of a complex library of amplification products. See, e.g., Hoops, Nucleic Acids Res. 25:4866-4871 (1997). Nonpolar molecules can also be used to mimic the shape of natural DNA bases. A non-hydrogen-bonding shape mimic for adenine can replicate efficiently and selectively against a nonpolar shape mimic for thymine (see, e.g., Morales, Nat. Struct. Biol. 5:950-954 (1998)). For example, two degenerate bases can be the pyrimidine base 6H,8H-3,4-dihydropyrimido[4,5-c][1,2]oxazin-7-one or the purine base N6-methoxy-2,6-diaminopurine (see, e.g., Hill, PNAS, 95:4258-63 (1998)). Exemplary degenerate primers of the invention incorporate the nucleobase analog 5′-Dimethoxytrityl-N-benzoyl-2′-deoxy-Cytidine,3′-[(2-cyanoethyl)-(N,N-diisopropyl)]-phosphoramidite (the term “P” in the sequences, see above). This pyrimidine analog hydrogen bonds with purines, including A and G residues.

[0109] Exemplary primer pairs for amplification of olfactory receptor transmembrane domains II through VII include:

| | |
|---|---|
| (a) | 5′-GGGGTCCGGAG(A/G)(C/G)(A/G)TA(A/G/T)AT(A/G/ |
| | P)A(A/G/P)(A/G/P)GG-3′ |
| | (SEQ ID NO: 524) |
| | and |
| | 5′-GGGGCTGCAGACACC(A/C/G/T)ATGTA(C/T)(C/T)T(A/ |
| | C/G/T)TT(C/T)(C/T)T-3′. |
| | (SEQ ID NO: 525) |
| (b) | 5′-GGGGTCCGGAG(A/G)(C/G)T(A/G)A(A/G/T)AT(A/G/ |
| | P)A(A/G/P)(A/G/P)GG-3′; |
| | (SEQ ID NO: 526) |
| | and |
| | 5′-GGGGCTGCAGACACC(AC/G/T)ATGTA(C/T)(C/T)T(A/C/ |
| | G/T)TT(C/T)(C/T)T-3′ |
| | (SEQ ID NO: 527) |
| (c) | 5′-GGGGTCCGGAG(A/G)(C/G)T(A/G)A(A/G/T)AT(A/G/C/ |
| | T)A(A/G/C/T)(A/G/C/T)GG-3′ |
| | (SEQ ID NO: 528) |
| | and |
| | 5′-GGGGCTGCAGACACC(A/C/G/T)ATGTA(C/T)(C/T)T(A/ |
| | C/G/T)TT(C/T)(C/T)T-3′ |
| | (SEQ ID NO: 558) |

[0110] Nucleic acids that encode ligand-binding regions of olfactory receptors may be generated by amplification (e.g., PCR) of appropriate nucleic acid sequences using degenerate primer pairs. The amplified nucleic acid can be genomic DNA from any cell or tissue or mRNA or cDNA derived from olfactory receptor-expressing cells, e.g., olfactory neurons or olfactory epithelium.

[0111] Isolation from olfactory receptor-expressing cells is well known in the art (cells expressing naturally or inducibly expressing olfactory receptors can be used to express the hybrid olfactory receptors of the invention to screen for potential odorants and odorant effect on cell physiology, as described below). For example, cells can be identified by olfactory marker protein (OMP), an abundant cytoplasmic protein expressed almost exclusively in mature olfactory sensory neurons (see, e.g., Buiakova, PNAS, 93:9858-63 (1996)). Shirley, Eur. J. Biochem. 32:485-494 (1983), describes a rat olfactory preparation suitable for biochemical studies in vitro on olfactory mechanisms. Cultures of adult rat olfactory receptor neurons are described by Vargas, Chem. Senses 24:211-216 (1999). Because these cultured neurons exhibit typical voltage-gated currents and are responsive to application of odorants, they can also be used to express the hybrid olfactory receptors of the invention for odorant screening (endogenous olfactory receptor can be initially blocked, if desired, by, e.g., antisense, knockout, and the like). U.S. Pat. No. 5,869,266 describes culturing human olfactory neurons for neurotoxicity tests and screening. Murrell, J. Neurosci. 19:8260-8270 (1999), describes differentiated olfactory receptor-expressing cells in culture that respond to odorants, as measured by an influx of calcium.

[0112] In one embodiment, hybrid protein-coding sequences comprising nucleic acids ORs fused to the translocation sequences described herein may be constructed. Also provided are hybrid ORs comprising the translocation motifs and ligand-binding domains of olfactory receptors. These nucleic acid sequences can be operably linked to transcriptional or translational control elements, e.g., transcription and translation initiation sequences, promoters and enhancers, transcription and translation terminators, polyadenylation sequences, and other sequences useful for transcribing DNA into RNA. In construction of recombinant expression cassettes, vectors, transgenics, and a promoter fragment can be employed to direct expression of the desired nucleic acid in all tissues. Olfactory cell-specific transcriptional elements can also be used to express the fusion polypeptide receptor, including, e.g., a 6.7 kb region upstream of the M4 olfactory receptor coding region. This region was sufficient to direct expression in olfactory epithelium with wild type zonal restriction and distributed neuronal expression for endogenous olfactory receptors (Qasba, J. Neurosci. 18:227-236 (1998)). Receptor genes are normally expressed in a small subset of neurons throughout a zonally restricted region of the sensory epithelium. The transcriptional or translational control elements can be isolated from natural sources, obtained from such sources as ATCC or GenBank libraries, or prepared by synthetic or recombinant methods.

[0113] In another embodiment, fusion proteins, either having C-terminal or, more preferably, N-terminal translocation sequences, may also comprise the translocation motif described herein. However, these fusion proteins can also comprise additional elements for, e.g., protein detection, purification, or other applications. Detection and purification facilitating domains include, e.g., metal chelating peptides such as polyhistidine tracts or histidine-tryptophan modules or other domains that allow purification on immobilized metals; maltose binding protein; protein A domains that allow purification on immobilized immunoglobulin; or the domain utilized in the FLAGS extension/affinity purification system (Immunex Corp, Seattle Wash.).

[0114] The inclusion of a cleavable linker sequences such as Factor Xa (see, e.g., Ottavi, Biochimie 80:289-293 (1998)), subtilisin protease recognition motif (see, e.g., Polyak, Protein Eng. 10:615-619 (1997)); enterokinase (Invitrogen, San Diego, Calif.), and the like, between the translocation domain (for efficient plasma membrane expression) and the rest of the newly translated polypeptide may be useful to facilitate purification. For example, one construct can include a polypeptide-encoding nucleic acid sequence linked to six histidine residues followed by a thioredoxin, an enterokinase cleavage site (see, e.g., Williams, Biochemistry 34:1787-1797 (1995)), and an amino terminal translocation domain. The histidine residues facilitate detection and purification while the enterokinase cleavage site provides a means for purifying the desired protein(s) from the remainder of the fusion protein. Technology pertaining to vectors encoding fusion proteins and application of fusion proteins are well described in the scientific and patent literature (see, e.g., Kroll, DNA Cell. Biol. 12:441-53 (1993)).

[0115] Expression vectors, either as individual expression vectors or as libraries of expression vectors, comprising the olfactory binding domain-encoding sequences may be introduced into a genome or into the cytoplasm or a nucleus of a cell and expressed by a variety of conventional techniques, well described in the scientific and patent literature (see e.g., Roberts, Nature 328:731 (1987); Berger supra; Schneider, Protein Expr. Purif. 6435:10 (1995); Sambrook; Tijssen; Ausubel). Product information from manufacturers of biological reagents and experimental equipment also provide information regarding known biological methods. The vectors can be isolated from natural sources, obtained from such sources as ATCC or GenBank libraries, or prepared by synthetic or recombinant methods.

[0116] The nucleic acids can be expressed in expression cassettes, vectors or viruses which are stably or transiently expressed in cells (e.g., episomal expression systems). Selection markers can be incorporated into expression cassettes and vectors to confer a selectable phenotype on transformed cells and sequences. For example, selection markers can code for episomal maintenance and replication such that integration into the host genome is not required. For example, the marker may encode antibiotic resistance (e.g., chloramphenicol, kanamycin, G418, bleomycin, hygromycin) or herbicide resistance (e.g., chlordsulfuron or Basta) to permit selection of those cells transformed with the desired DNA sequences (see, e.g., Blondelet-Rouault, Gene 190:315-17 (1997); Aubrecht, J. Pharmacol. Exp. Ther., 281:992-97 (1997)). Because selectable marker genes conferring resistance to substrates like neomycin or hygromycin can only be utilized in tissue culture, chemoresistance genes are also used as selectable markers in vitro and in vivo.

[0117] A chimeric nucleic acid sequence may encode a ligand-binding domain within any 7-transmembrane polypeptide. 7-transmembrane receptors belong to a superfamily of transmembrane (TM) proteins having seven domains that traverse a plasma membrane seven times. Each of the seven domains spans the plasma membrane (TM I to TM VII). Because 7-transmembrane receptor polypeptides have similar primary sequences and secondary and tertiary structures, structural domains (e.g., TM domains) can be readily identified by sequence analysis. For example, homology modeling, Fourier analysis and helical periodicity detection can identify and characterize the seven domains with a 7-transmembrane receptor sequence. Fast Fourier Transform (FFT) algorithms can be used to assess the dominant periods that characterize profiles of the hydrophobicity and variability of analyzed sequences. To predict TM domains and their boundaries and topology, a “neural network algorithm” by “PHD server” can be used, as done by Pilpel, Protein Science 8:969-977 (1999); Rost, Protein Sci. 4:521-533 (1995). Periodicity detection enhancement and alpha helical periodicity index can be done as by, e.g., Donnelly, Protein Sci. 2:55-70 (1993). Other alignment and modeling algorithms are well known in the art, see, e.g., Peitsch, Receptors Channels 4:161-164 (1996); Cronet, Protein Eng. 6:59-64 (1993) (homology and “discover modeling”); http://bioinfo.weizmann.ac.il/.

[0118] The library sequences include receptor sequences that correspond to TM ligand-binding domains, including, e.g., TM II to VII, TM II to VI, TM III to VII, and TM III to VII, that have been amplified (e.g., PCR) from mRNA of or cDNA derived from, e.g., olfactory receptor-expressing neurons or genomic DNA.

[0119] Libraries of olfactory receptor ligand-binding TM domain sequences can include a various TM domains or variations thereof, as described above. These sequences can be derived from any 7-transmembrane receptor. Because these polypeptides have similar primary sequences and secondary and tertiary structures, the seven domains can be identified by various analyses well known in the art, including, e.g., homology modeling, Fourier analysis and helical periodicity (see, e.g., Pilpel supra), as described above. Using this information sequences flanking the seven domains can be identified and used to design degenerate primers for amplification of various combinations of TM regions and subsequences.

[0120] The present invention also includes not only the DNA and proteins having the specified amino acid sequences, but also DNA fragments, particularly fragments of, for example, 40, 60, 80, 100, 150, 200, or 250 nucleotides, or more, as well as protein fragments of, for example, 10, 20, 30, 50, 70, 100, or 150 amino acids, or more.

[0121] Also contemplated are chimeric proteins, comprising at least 10, 20, 30, 50, 70, 100, or 150 amino acids, or more, of one of at least one of the olfactory receptors described herein, coupled to additional amino acids representing all or part of another G protein receptor, preferably a member of the 7TM superfamily. These chimeras can be made from the instant receptors and a G protein receptor described herein, or they can be made by combining two or more of the present proteins. In one preferred embodiment, one portion of the chimera corresponds to and is derived from one or more of the domains of the seven transmembrane protein described herein, and the remaining portion or portions come from another G protein-coupled receptor. Chimeric receptors are well known in the art, and the techniques for creating them and the selection and boundaries of domains or fragments of G protein-coupled receptors for incorporation therein are also well known. Thus, this knowledge of those skilled in the art can readily be used to create such chimeric receptors. The use of such chimeric receptors can provide, for example, an olfactory selectivity characteristic of one of the receptors specifically disclosed herein, coupled with the signal transduction characteristics of another receptor, such as a well known receptor used in prior art assay systems.

[0122] For example, a domain such as a ligand-binding domain, an extracellular domain, a transmembrane domain (e.g., one comprising seven transmembrane regions and corresponding extracellular and cytosolic loops), the transmembrane domain and a cytoplasmic domain, an active site, a subunit association region, etc., can be covalently linked to a heterologous protein. For instance, an extracellular domain can be linked to a heterologous GPCR transmembrane domain, or a heterologous GPCR extracellular domain can be linked to a transmembrane domain. Other heterologous proteins of choice can include, e.g., green fluorescent protein, β-gal, glutamtate receptor, and the rhodopsin presequence.

[0123] Polymorphic variants, alleles, and interspecies homologs that are substantially identical to an olfactory receptor disclosed herein can be isolated using the nucleic acid probes described above. It is hypothesized that allelic differences in receptors may explain why there is a difference in olfactory sensation in different human subjects. Accordingly, the identification of such alleles may be significant, especially with respect to producing receptor libraries that adequately represent the olfactory capability of the human population, i.e., which take into account allelic differences in different individuals. Alternatively, expression libraries can be used to clone olfactory receptors and polymorphic variants, alleles, and interspecies homologs thereof, by detecting expressed homologs immunologically with antisera or purified antibodies made against an olfactory polypeptide, which also recognize and selectively bind to the olfactory receptor homolog.

[0124] Also within the scope of the invention are host cells for expressing the ORs, fragments, or variants of the invention. To obtain high levels of expression of a cloned gene or nucleic acid, such as cDNAs encoding the olfactory receptors, fragments, or variants of the invention, one of skill typically subclones the nucleic acid sequence of interest into an expression vector that contains a strong promoter to direct transcription, a transcription/translation terminator, and if for a nucleic acid encoding a protein, a ribosome binding site for translational initiation. Suitable bacterial promoters are well known in the art and described, e.g., in Sambrook et al. However, bacterial or eukaryotic expression systems can be used.

[0125] Any of the well-known procedures for introducing foreign nucleotide sequences into host cells may be used. These include the use of calcium phosphate transfection, polybrene, protoplast fusion, electroporation, liposomes, microinjection, plasma vectors, viral vectors and any of the other well known methods for introducing cloned genomic DNA, cDNA, synthetic DNA or other foreign genetic material into a host cell (see, e.g., Sambrook et al.) It is only necessary that the particular genetic engineering procedure used be capable of successfully introducing at lest one gene into the host cell capable of expressing the olfactory receptor, fragment, or variant of interest.

[0126] After the expression vector is introduced into the cells, the transfected cells are cultured under conditions favoring expression of the receptor, fragment, or variant of interest, which is then recovered from the culture using standard techniques. Examples of such techniques are well known in the art. See, e.g., WO 00/06593, which is incorporated by reference in a manner consistent with this disclosure.

D. Immunological Detection of OR Polypeptides

[0127] In addition to the detection of OR genes and gene expression using nucleic acid hybridization technology, one can also use immunoassays to detect ORs, e.g., to identify olfactory receptor cells, and variants of OR family members. Immunoassays can be used to qualitatively or quantitatively analyze the ORs. A general overview of the applicable technology can be found in Harlow & Lane, Antibodies: A Laboratory Manual (1988).

[0128] 1. Antibodies to OR Family Members

[0129] Methods of producing polyclonal and monoclonal antibodies that react specifically with a OR family member are known to those of skill in the art (see, e.g., Coligan, Current Protocols in Immunology (1991); Harlow & Lane, supra; Goding, Monoclonal Antibodies: Principles and Practice (2d ed. 1986); and Kohler & Milstein, Nature, 256:495-97 (1975)). Such techniques include antibody preparation by selection of antibodies from libraries of recombinant antibodies in phage or similar vectors, as well as preparation of polyclonal and monoclonal antibodies by immunizing rabbits or mice (see, e.g., Huse et al., Science, 246:1275-81 (1989); Ward et al., Nature, 341:544-46 (1989)).

[0130] A number of OR-comprising immunogens may be used to produce antibodies specifically reactive with a OR family member. For example, a recombinant OR protein, or an antigenic fragment thereof, can be isolated as described herein. Suitable antigenic regions include, e.g., the conserved motifs that are used to identify members of the OR family. Recombinant proteins can be expressed in eukaryotic or prokaryotic cells as described above, and purified as generally described above. Recombinant protein is the preferred immunogen for the production of monoclonal or polyclonal antibodies. Alternatively, a synthetic peptide derived from the sequences disclosed herein and conjugated to a carrier protein can be used an immunogen. Naturally occurring protein may also be used either in pure or impure form. The product is then injected into an animal capable of producing antibodies. Either monoclonal or polyclonal antibodies may be generated, for subsequent use in immunoassays to measure the protein.

[0131] Methods of production of polyclonal antibodies are known to those of skill in the art. For example, an inbred strain of mice (e.g., BALB/C mice) or rabbits may be immunized with the protein using a standard adjuvant, such as Freund's adjuvant, and a standard immunization protocol. The animal's immune response to the immunogen preparation is monitored by taking test bleeds and determining the titer of reactivity to the OR. When appropriately high titers of antibody to the immunogen are obtained, blood is collected from the animal and antisera are prepared. Further fractionation of the antisera to enrich for antibodies reactive to the protein can be done if desired (see Harlow & Lane, supra).

[0132] Monoclonal antibodies may be obtained by various techniques familiar to those skilled in the art. Briefly, spleen cells from an animal immunized with a desired antigen may be immortalized, commonly by fusion with a myeloma cell (see Kohler & Milstein, Eur. J. Immunol., 6:511-19 (1976)). Alternative methods of immortalization include transformation with Epstein Barr Virus, oncogenes, or retroviruses, or other methods well known in the art. Colonies arising from single immortalized cells are screened for production of antibodies of the desired specificity and affinity for the antigen, and yield of the monoclonal antibodies produced by such cells may be enhanced by various techniques, including injection into the peritoneal cavity of a vertebrate host. Alternatively, one may isolate DNA sequences which encode a monoclonal antibody or a binding fragment thereof by screening a DNA library from human B cells according to the general protocol outlined by Huse et al., Science, 246:1275-1281 (1989).

[0133] Monoclonal antibodies and polyclonal sera are collected and titered against the immunogen protein in an immunoassay, for example, a solid phase immunoassay with the immunogen immobilized on a solid support. Typically, polyclonal antisera with a titer of 109 or greater are selected and tested for their cross reactivity against non-OR proteins, or even other OR family members or other related proteins from other organisms, using a competitive binding immunoassay. Specific polyclonal antisera and monoclonal antibodies will usually bind with a Kd of at least about 0.1 mM, more usually at least about 1 pM, optionally at least about 0.1 pM or better, and optionally 0.01 pM or better.

[0134] Once OR family member specific antibodies are available, individual OR proteins can be detected by a variety of immunoassay methods. For a review of immunological and immunoassay procedures, see Basic and Clinical Immunology (Stites & Terr eds., 7th ed. 1991). Moreover, the immunoassays of the present invention can be performed in any of several configurations, which are reviewed extensively in Enzyme Immunoassay (Maggio, ed., 1980); and Harlow & Lane, supra.

[0135] 2. Immunological Binding Assays

[0136] OR proteins can be detected and/or quantified using any of a number of well recognized immunological binding assays (see, e.g., U.S. Pat. Nos. 4,366,241; 4,376,110; 4,517,288; and 4,837,168). For a review of the general immunoassays, see also Methods in Cell Biology: Antibodies in Cell Biology, volume 37 (Asai, ed. 1993); Basic and Clinical Immunology (Stites & Terr, eds., 7th ed. 1991). Immunological binding assays (or immunoassays) typically use an antibody that specifically binds to a protein or antigen of choice (in this case an OR family member or an antigenic subsequence thereof). The antibody (e.g., anti-OR) may be produced by any of a number of means well known to those of skill in the art and as described above.

[0137] Immunoassays also often use a labeling agent to specifically bind to and label the complex formed by the antibody and antigen. The labeling agent may itself be one of the moieties comprising the antibody/antigen complex. Thus, the labeling agent may be a labeled OR polypeptide or a labeled anti-OR antibody. Alternatively, the labeling agent may be a third moiety, such a secondary antibody that specifically binds to the antibody/OR complex (a secondary antibody is typically specific to antibodies of the species from which the first antibody is derived). Other proteins capable of specifically binding immunoglobulin constant regions, such as protein A or protein G may also be used as the label agent. These proteins exhibit a strong non-immunogenic reactivity with immunoglobulin constant regions from a variety of species (see, e.g., Kronval et al., J. Immunol., 111:1401-1406 (1973); Akerstrom et al., J. Immunol., 135:2589-2542 (1985)). The labeling agent can be modified with a detectable moiety, such as biotin, to which another molecule can specifically bind, such as streptavidin. A variety of detectable moieties are well known to those skilled in the art.

[0138] Throughout the assays, incubation and/or washing steps may be required after each combination of reagents. Incubation steps can vary from about 5 seconds to several hours, optionally from about 5 minutes to about 24 hours. However, the incubation time will depend upon the assay format, antigen, volume of solution, concentrations, and the like. Usually, the assays will be carried out at ambient temperature, although they can be conducted over a range of temperatures, such as 10° C. to 40° C.

[0139] a. Non-Competitive Assay Formats

[0140] Immunoassays for detecting an OR protein in a sample may be either competitive or noncompetitive. Noncompetitive immunoassays are assays in which the amount of antigen is directly measured. In one preferred “sandwich” assay, for example, the anti-OR antibodies can be bound directly to a solid substrate on which they are immobilized. These immobilized antibodies then capture the OR protein present in the test sample. The OR protein is thus immobilized is then bound by a labeling agent, such as a second OR antibody bearing a label. Alternatively, the second antibody may lack a label, but it may, in turn, be bound by a labeled third antibody specific to antibodies of the species from which the second antibody is derived. The second or third antibody is typically modified with a detectable moiety, such as biotin, to which another molecule specifically binds, e.g., streptavidin, to provide a detectable moiety.

[0141] b. Competitive Assay Formats

[0142] In competitive assays, the amount of OR protein present in the sample is measured indirectly by measuring the amount of a known, added (exogenous) OR protein displaced (competed away) from an anti-OR antibody by the unknown OR protein present in a sample. In one competitive assay, a known amount of OR protein is added to a sample and the sample is then contacted with an antibody that specifically binds to the OR. The amount of exogenous OR protein bound to the antibody is inversely proportional to the concentration of OR protein present in the sample. In a particularly preferred embodiment, the antibody is immobilized on a solid substrate. The amount of OR protein bound to the antibody may be determined either by measuring the amount of OR protein present in a OR/antibody complex, or alternatively by measuring the amount of remaining uncomplexed protein. The amount of OR protein may be detected by providing a labeled OR molecule.

[0143] A hapten inhibition assay is another preferred competitive assay. In this assay the known OR protein is immobilized on a solid substrate. A known amount of anti-OR antibody is added to the sample, and the sample is then contacted with the immobilized OR. The amount of anti-OR antibody bound to the known immobilized OR protein is inversely proportional to the amount of OR protein present in the sample. Again, the amount of immobilized antibody may be detected by detecting either the immobilized fraction of antibody or the fraction of the antibody that remains in solution. Detection may be direct where the antibody is labeled or indirect by the subsequent addition of a labeled moiety that specifically binds to the antibody as described above.

[0144] c. Cross-Reactivity Determinations

[0145] Immunoassays in the competitive binding format can also be used for cross-reactivity determinations. For example, a protein at least partially encoded by the nucleic acid sequences disclosed herein can be immobilized to a solid support. Proteins (e.g., OR proteins and homologs) are added to the assay that compete for binding of the antisera to the immobilized antigen. The ability of the added proteins to compete for binding of the antisera to the immobilized protein is compared to the ability of the OR polypeptide encoded by the nucleic acid sequences disclosed herein to compete with itself. The percent cross-reactivity for the above proteins is calculated, using standard calculations. Those antisera with less than 10% cross-reactivity with each of the added proteins listed above are selected and pooled. The cross-reacting antibodies are optionally removed from the pooled antisera by immunoabsorption with the added considered proteins, e.g., distantly related homologs. In addition, peptides comprising amino acid sequences representing conserved motifs that are used to identify members of the OR family can be used in cross-reactivity determinations.

[0146] The immunoabsorbed and pooled antisera are then used in a competitive binding immunoassay as described above to compare a second protein, thought to be perhaps an allele or polymorphic variant of a OR family member, to the immunogen protein (i.e., OR protein encoded by the nucleic acid sequences disclosed herein). In order to make this comparison, the two proteins are each assayed at a wide range of concentrations and the amount of each protein required to inhibit 50% of the binding of the antisera to the immobilized protein is determined. If the amount of the second protein required to inhibit 50% of binding is less than 10 times the amount of the protein encoded by nucleic acid sequences disclosed herein required to inhibit 50% of binding, then the second protein is said to specifically bind to the polyclonal antibodies generated to a OR immunogen.

[0147] Antibodies raised against OR conserved motifs can also be used to prepare antibodies that specifically bind only to GPCRs of the OR family, but not to GPCRs from other families.

[0148] Polyclonal antibodies that specifically bind to a particular member of the OR family, e.g., AOLFR1, can be make by subtracting out cross-reactive antibodies using other OR family members. Species-specific polyclonal antibodies can be made in a similar way. For example, antibodies specific to human AOLFR1 can be made by, subtracting out antibodies that are cross-reactive with orthologous sequences, e.g., rat OR1 or mouse OR1.

[0149] d. Other Assay Formats

[0150] Western blot (immunoblot) analysis is used to detect and quantify the presence of OR protein in the sample. The technique generally comprises separating sample proteins by gel electrophoresis on the basis of molecular weight, transferring the separated proteins to a suitable solid support, (such as a nitrocellulose filter, a nylon filter, or derivatized nylon filter), and incubating the sample with the antibodies that specifically bind the OR protein. The anti-OR polypeptide antibodies specifically bind to the OR polypeptide on the solid support. These antibodies may be directly labeled or alternatively may be subsequently detected using labeled antibodies (e.g., labeled sheep anti-mouse antibodies) that specifically bind to the anti-OR antibodies.

[0151] Other, assay formats include liposome immunoassays (LIA), which use liposomes designed to bind specific molecules (e.g., antibodies) and release encapsulated reagents or markers. The released chemicals are then detected according to standard techniques (see Monroe et al., Amer. Clin. Prod. Rev., 5:34-41 (1986)).

[0152] e. Reduction of Non-Specific Binding

[0153] One of skill in the art will appreciate that it is often desirable to minimize non-specific binding in immunoassays. Particularly, where the assay involves an antigen or antibody immobilized on a solid substrate it is desirable to minimize the amount of non-specific binding to the substrate. Means of reducing such non-specific binding are well known to those of skill in the art. Typically, this technique involves coating the substrate with a proteinaceous composition. In particular, protein compositions such as bovine serum albumin (BSA), nonfat powdered milk, and gelatin are widely used with powdered milk being most preferred.

[0154] f. Labels

[0155] The particular label or detectable group used in the assay is not a critical aspect of the invention, as long as it does not significantly interfere with the specific binding of the antibody used in the assay. The detectable group can be any material having a detectable physical or chemical property. Such detectable labels have been well-developed in the field of immunoassays and, in general, most any label useful in such methods can be applied to the present invention. Thus, a label is any composition detectable by spectroscopic, photochemical, biochemical, immunochemical, electrical, optical or chemical means. Useful labels in the present invention include magnetic beads (e.g., DYNABEADS™) (SEQ ID NO: 529), fluorescent dyes (e.g., fluorescein isothiocyanate, Texas red, rhodamine, and the like), radiolabels (e.g., ³H, ¹²⁵I, ³⁵S, ¹⁴C, ³²P), enzymes (e.g., horseradish peroxidase, alkaline phosphatase and others commonly used in an ELISA), and colorimetric labels such as colloidal gold or colored glass or plastic beads (e.g., polystyrene, polypropylene, latex, etc.).

[0156] The label may be coupled directly or indirectly to the desired component of the assay according to methods well known in the art. As indicated above, a wide variety of labels may be used, with the choice of label depending on sensitivity required, ease of conjugation with the compound, stability requirements, available instrumentation, and disposal provisions.

[0157] Non-radioactive labels are often attached by indirect means. Generally, a ligand molecule (e.g., biotin) is covalently bound to the molecule. The ligand then binds to another molecules (e.g., streptavidin) molecule, which is either inherently detectable or covalently bound to a signal system, such as a detectable enzyme, a fluorescent compound, or a chemiluminescent compound. The ligands and their targets can be used in any suitable combination with antibodies that recognize a OR protein, or secondary antibodies that recognize anti-OR.

[0158] The molecules can also be conjugated directly to signal generating compounds, e.g. by conjugation with an enzyme or fluorophore. Enzymes of interest as labels will primarily be hydrolases, particularly phosphatases, esterases and glycosidases, or oxidotases, particularly peroxidases. Fluorescent compounds include fluorescein and its derivatives, rhodamine and its derivatives, dansyl, umbelliferone, etc. Chemiluminescent compounds include luciferin, and 2,3-dihydrophthalazinediones, e.g., luminol. For a review of various labeling or signal producing systems that may be used, see U.S. Pat. No. 4,391,904.

[0159] Means of detecting labels are well known to those of skill in the art. Thus, for example, where the label is a radioactive label, means for detection include a scintillation counter or photographic film as in autoradiography. Where the label is a fluorescent label, it may be detected by exciting the fluorochrome with the appropriate wavelength of light and detecting the resulting fluorescence. The fluorescence may be detected visually, by means of photographic film, by the use of electronic detectors such as charge coupled devices (CCDs) or photomultipliers and the like. Similarly, enzymatic labels may be detected by providing the appropriate substrates for the enzyme and detecting the resulting reaction product. Finally simple calorimetric labels may be detected simply by observing the color associated with the label. Thus, in various dipstick assays, conjugated gold often appears pink, while various conjugated beads appear the color of the bead.

[0160] Some assay formats do not require the use of labeled components. For instance, agglutination assays can be used to detect the presence of the target antibodies. In this case, antigen-coated particles are agglutinated by samples comprising the target antibodies. In this format, none of the components need be labeled and the presence of the target antibody is detected by simple visual inspection.

E. Detection of Olfactory Modulators

[0161] Methods and compositions for determining whether a test compound specifically binds to a mammalian chemosensory, and more particularly, an olfactory receptor of the invention, both in vitro and in vivo are described below. Many aspects of cell physiology can be monitored to assess the effect of ligand-binding to a naturally-occurring or chimeric olfactory receptor. These assays may be performed on intact cells expressing an olfactory receptor, on permeabilized cells or on membrane fractions produced by standard methods.

[0162] Olfactory receptors are normally located on the specialized cilia of olfactory neurons. These receptors bind odorants and initiate the transduction of chemical stimuli into electrical signals. An activated or inhibited G protein will in turn alter the properties of target enzymes, channels, and other effector proteins. Some examples include the activation of cGMP phosphodiesterase by transducin in the visual system, adenylate cyclase by the stimulatory G protein, phospholipase C by Gq and other cognate G proteins, and modulation of diverse channels by Gi and other G proteins. Downstream consequences can also be examined such as generation of diacyl glycerol and IP3 by phospholipase C, and in turn, for calcium mobilization by IP3.

[0163] The OR protein of the assay will typically be selected from a polypeptide having a sequence selected from SEQ. ID. NO. 1, SEQ. ID. NO. 3, SEQ. ID. NO. 5, SEQ. ID. NO. 7, SEQ. ID. NO. 9, SEQ. ID. NO. 11, SEQ. ID. NO. 13, SEQ. ID. NO. 15, SEQ. ID. NO. 17, SEQ. ID. NO. 19, SEQ. ID. NO. 21, SEQ. ID. NO. 23, SEQ. ID. NO. 25, SEQ. ID. NO. 27, SEQ. ID. NO. 29, SEQ. ID. NO. 31, SEQ. ID. NO. 33, SEQ. ID. NO. 35, SEQ. ID. NO. 37, SEQ. ID. NO. 39, SEQ. ID. NO. 41, SEQ. ID. NO. 43, SEQ. ID. NO. 45, SEQ. ID. NO. 47, SEQ. ID. NO. 49, SEQ. ID. NO. 51, SEQ. ID. NO. 53, SEQ. ID. NO. 55, SEQ. ID. NO. 57, SEQ. ID. NO. 59, SEQ. ID. NO. 61, SEQ. ID. NO. 63, SEQ. ID. NO. 65, SEQ. ID. NO. 67, SEQ. ID. NO. 69, SEQ. ID. NO. 71, SEQ. ID. NO. 73, SEQ. ID. NO. 75, SEQ. ID. NO. 77, SEQ. ID. NO. 79, SEQ. ID. NO. 81, SEQ. ID. NO. 83, SEQ. ID. NO. 85, SEQ. ID. NO. 87, SEQ. ID. NO. 89, SEQ. ID. NO. 91, SEQ. ID. NO. 93, SEQ. ID. NO. 95, SEQ. ID. NO. 97, SEQ. ID. NO. 99, SEQ. ID. NO. 101, SEQ. ID. NO. 103, SEQ. ID. NO. 105, SEQ. ID. NO. 107, SEQ. ID. NO. 109, SEQ. ID. NO. 111, SEQ. ID. NO. 113, SEQ. ID. NO. 115, SEQ. ID. NO. 117, SEQ. ID. NO. 119, SEQ. ID. NO. 121, SEQ. ID. NO. 123, SEQ. ID. NO. 125, SEQ. ID. NO. 127, SEQ. ID. NO. 129, SEQ. ID. NO. 131, SEQ. ID. NO. 133, SEQ. ID. NO. 135, SEQ. ID. NO. 157, SEQ. ID. NO. 139, SEQ. ID. NO. 141, SEQ. ID. NO. 143, SEQ. ID. NO. 145, SEQ. ID. NO. 147, SEQ. ID. NO. 149, SEQ. ID. NO. 151, SEQ. ID. NO. 153, SEQ. ID. NO. 155, SEQ. ID. NO. 157, SEQ. ID. NO. 159, SEQ. ID. NO. 161, SEQ. ID. NO. 163, SEQ. ID. NO. 165, SEQ. ID. NO. 167, SEQ. ID. NO. 169, SEQ. ID. NO. 171, SEQ. ID. NO. 173, SEQ. ID. NO. 175, SEQ. ID. NO. 177, SEQ. ID. NO. 179, SEQ. ID. NO. 181, SEQ. ID. NO. 183, SEQ. ID. NO. 185, SEQ. ID. NO. 187, SEQ. ID. NO. 189, SEQ. ID. NO. 191, SEQ. ID. NO. 193, SEQ. ID. NO. 195, SEQ. ID. NO. 197, SEQ. ID. NO. 199, SEQ. ID. NO. 201, SEQ. ID. NO. 203, SEQ. ID. NO. 205, SEQ. ID. NO. 207, SEQ. ID. NO. 209, SEQ. ID. NO. 211, SEQ. ID. NO. 213, SEQ. ID. NO. 215, SEQ. ID. NO. 217, SEQ. ID. NO. 219, SEQ. ID. NO. 221, SEQ. ID. NO. 223, SEQ. ID. NO. 225, SEQ. ID. NO. 227, SEQ. ID. NO. 229, SEQ. ID. NO. 231, SEQ. ID. NO. 233, SEQ. ID. NO. 235, SEQ. ID. NO. 237, SEQ. ID. NO. 239, SEQ. ID. NO. 241, SEQ. ID. NO. 243, SEQ. ID. NO. 245, SEQ. ID. NO. 247, SEQ. ID. NO. 249, SEQ. ID. NO. 251, SEQ. ID. NO. 253, SEQ. ID. NO. 255, SEQ. ID. NO. 257, SEQ. ID. NO. 259, SEQ. ID. NO. 261, SEQ. ID. NO., 263, SEQ. ID. NO., 265, SEQ. ID. NO. 267, SEQ. ID. NO. 269, SEQ. ID. NO. 271, SEQ. ID. NO. 273, SEQ. ID. NO. 275, SEQ. ID. NO. 277, SEQ. ID. NO. 279, SEQ. ID. NO. 281, SEQ. ID. NO. 283, SEQ. ID. NO. 285, SEQ. ID. NO. 287, SEQ. ID. NO. 289, SEQ. ID. NO. 291, SEQ. ID. NO. 293, SEQ. ID. NO. 295, SEQ. ID. NO. 297, SEQ. ID. NO. 299, SEQ. ID. NO. 301, SEQ. ID. NO. 303, SEQ. ID. NO. 305, SEQ. ID. NO. 307, SEQ. ID. NO. 309, SEQ. ID. NO. 311, SEQ. ID. NO. 313, SEQ. ID. NO. 315, SEQ. ID. NO. 317, SEQ. ID. NO. 319, SEQ. ID. NO. 321, SEQ. ID. NO. 323, SEQ. ID. NO. 325, SEQ. ID. NO. 327, SEQ. ID. NO. 329, SEQ. ID. NO. 331, SEQ. ID. NO. 333, SEQ. ID. NO. 335, SEQ. ID. NO. 337, SEQ. ID. NO. 339, SEQ. ID. NO. 341, SEQ. ID. NO. 343, SEQ. ID. NO. 345, SEQ. ID. NO. 347, SEQ. ID. NO. 349, SEQ. ID. NO. 351, SEQ. ID. NO. 353, SEQ. ID. NO. 355, SEQ. ID. NO. 357, SEQ. ID. NO. 359, SEQ. ID. NO. 361, SEQ. ID. NO. 363, SEQ. ID. NO. 365, SEQ. ID. NO. 367, SEQ. ID. NO. 369, SEQ ID NO: 371, SEQ. ID. NO. 373, SEQ. ID. NO. 375, SEQ. ID. NO. 377, SEQ. ID. NO. 379, SEQ. ID. NO. 381, SEQ. ID. NO. 383, SEQ. ID. NO. 385, SEQ. ID. NO. 387, SEQ. ID. NO. 389, SEQ. ID. NO. 391, SEQ. ID. NO. 393, SEQ. ID. NO. 395, SEQ. ID. NO. 397, SEQ. ID. NO. 399, SEQ. ID. NO. 401, SEQ. ID. NO. 403, SEQ. ID. NO. 405, SEQ. ID. NO. 407, SEQ. ID. NO. 409, SEQ. ID. NO. 411, SEQ. ID. NO. 413, SEQ. ID. NO. 415, SEQ. ID. NO. 417, SEQ. ID. NO. 419, SEQ. ID. NO. 421, SEQ. ID. NO. 423, SEQ. ID. NO. 425, SEQ. ID. NO. 427, SEQ. ID. NO. 429, SEQ. ID. NO. 431, SEQ. ID. NO. 433, SEQ. ID. NO. 435, SEQ. ID. NO. 437, SEQ. ID. NO. 439, SEQ. ID. NO. 441, SEQ. ID. NO. 443, SEQ. ID. NO. 445, SEQ. ID. NO. 447, SEQ. ID. NO. 449, SEQ. ID. NO. 451, SEQ. ID. NO. 453, SEQ. ID. NO. 455, SEQ. ID. NO. 457, SEQ. ID. NO. 459, SEQ. ID. NO. 461, SEQ. ID. NO. 463, SEQ. ID. NO. 465, SEQ. ID. NO. 467, SEQ. ID. NO. 469, SEQ. ID. NO. 471, SEQ. ID. NO. 473, SEQ. ID. NO. 475, SEQ. ID. NO. 477, SEQ. ID. NO. 479, SEQ. ID. NO. 481, SEQ. ID. NO. 483, SEQ. ID. NO. 485, SEQ. ID. NO. 487, SEQ. ID. NO. 489, SEQ. ID. NO. 491, SEQ. ID. NO. 493, SEQ ID NO: 495, SEQ ID NO: 497, SEQ ID NO: 499, SEQ ID NO: 501, SEQ ID NO: 503, SEQ ID NO: 505, SEQ ID NO: 507, SEQ ID NO: 509 and SEQ ID NO: 511, or conservatively modified variant thereof.

[0164] Alternatively, the OR protein of the assay can be derived from a eukaryote host cell and can include an amino acid subsequence having at least about 30-40% amino acid sequence identity to SEQ. ID. NO. 1, SEQ. ID. NO. 3, SEQ. ID. NO. 5, SEQ. ID. NO. 7, SEQ. ID. NO. 9, SEQ. ID. NO. 11, SEQ. ID. NO. 13, SEQ. ID. NO. 15, SEQ. ID. NO. 17, SEQ. ID. NO. 19, SEQ. ID. NO. 21, SEQ. ID. NO. 23, SEQ. ID. NO. 25, SEQ. ID. NO. 27, SEQ. ID. NO. 29, SEQ. ID. NO. 31, SEQ. ID. NO. 33, SEQ. ID. NO. 35, SEQ. ID. NO. 37, SEQ. ID. NO. 39, SEQ. ID. NO. 41, SEQ. ID. NO. 43, SEQ. ID. NO. 45, SEQ. ID. NO. 47, SEQ. ID. NO. 49, SEQ. ID. NO. 51, SEQ. ID. NO. 53, SEQ. ID. NO. 55, SEQ. ID. NO. 57, SEQ. ID. NO. 59, SEQ. ID. NO. 61, SEQ. ID. NO. 63, SEQ. ID. NO. 65, SEQ. ID. NO. 67, SEQ. ID. NO. 69, SEQ. ID. NO. 71, SEQ. ID. NO. 73, SEQ. ID. NO. 75, SEQ. ID. NO. 77, SEQ. ID. NO. 79, SEQ. ID. NO. 81, SEQ. ID. NO. 83, SEQ. ID. NO. 85, SEQ. ID. NO. 87, SEQ. ID. NO. 89, SEQ. ID. NO. 91, SEQ. ID. NO. 93, SEQ. ID. NO. 95, SEQ. ID. NO. 97, SEQ. ID. NO. 99, SEQ. ID. NO. 101, SEQ. ID. NO. 103, SEQ. ID. NO. 105, SEQ. ID. NO. 107, SEQ. ID. NO. 109, SEQ. ID. NO. 111, SEQ. ID. NO. 113, SEQ. ID. NO. 115, SEQ. ID. NO. 117, SEQ. ID. NO. 119, SEQ. ID. NO. 121, SEQ. ID. NO. 123, SEQ. ID. NO. 125, SEQ. ID. NO. 127, SEQ. ID. NO. 129, SEQ. ID. NO. 131, SEQ. ID. NO. 133, SEQ. ID. NO. 135, SEQ. ID. NO. 137, SEQ. ID. NO. 139, SEQ. ID. NO. 141, SEQ. ID. NO. 143, SEQ. ID. NO. 145, SEQ. ID. NO. 147, SEQ. ID. NO. 149, SEQ. ID. NO. 151, SEQ. ID. NO. 153, SEQ. ID. NO. 155, SEQ. ID. NO. 157, SEQ. ID. NO. 159, SEQ. ID. NO. 161, SEQ. ID. NO. 163, SEQ. ID. NO. 165, SEQ. ID. NO. 167, SEQ. ID. NO. 169, SEQ. ID. NO. 171, SEQ. ID. NO. 173, SEQ. ID. NO. 175, SEQ. ID. NO. 177, SEQ. ID. NO. 179, SEQ. ID. NO. 181, SEQ. ID. NO. 183, SEQ. ID. NO. 185, SEQ. ID. NO. 187, SEQ. ID. NO. 189, SEQ. ID. NO. 191, SEQ. ID. NO. 193, SEQ. ID. NO. 195, SEQ. ID. NO. 197, SEQ. ID. NO. 199, SEQ. ID. NO. 201, SEQ. ID. NO. 203, SEQ. ID. NO. 205, SEQ. ID. NO. 207, SEQ. ID. NO. 209, SEQ. ID. NO. 211, SEQ. ID. NO. 213, SEQ. ID. NO. 215, SEQ. ID. NO. 217, SEQ. ID. NO. 219, SEQ. ID. NO. 221, SEQ. ID. NO. 223, SEQ. ID. NO. 225, SEQ. ID. NO. 227, SEQ. ID. NO. 229, SEQ. ID. NO. 231, SEQ. ID. NO. 233, SEQ. ID. NO. 235, SEQ. ID. NO. 237, SEQ. ID. NO. 239, SEQ. ID. NO. 241, SEQ. ID. NO. 243, SEQ. ID. NO. 245, SEQ. ID. NO. 247, SEQ. ID. NO. 249, SEQ. ID. NO. 251, SEQ. ID. NO. 253, SEQ. ID. NO. 255, SEQ. ID. NO. 257, SEQ. ID. NO. 259, SEQ. ID. NO. 261, SEQ. ID. NO., 263, SEQ. ID. NO., 265, SEQ. ID. NO. 267, SEQ. ID. NO. 269, SEQ. ID. NO. 271, SEQ. ID. NO. 273, SEQ. ID. NO. 275, SEQ. ID. NO. 277, SEQ. ID. NO. 279, SEQ. ID. NO. 281, SEQ. ID. NO. 283, SEQ. ID. NO. 285, SEQ. ID. NO. 287, SEQ. ID. NO. 289, SEQ. ID. NO. 291, SEQ. ID. NO. 293, SEQ. ID. NO. 295, SEQ. ID. NO. 297, SEQ. ID. NO. 299, SEQ. ID. NO. 301, SEQ. ID. NO. 303, SEQ. ID. NO. 305, SEQ. ID. NO. 307, SEQ. ID. NO. 309, SEQ. ID. NO. 311, SEQ. ID. NO. 313, SEQ. ID. NO. 315, SEQ. ID. NO. 317, SEQ. ID. NO. 319, SEQ. ID. NO. 321, SEQ. ID. NO. 323, SEQ. ID. NO. 325, SEQ. ID. NO. 327, SEQ. ID. NO. 329, SEQ. ID. NO. 331, SEQ. ID. NO. 333, SEQ. ID. NO. 335, SEQ. ID. NO. 337, SEQ. ID. NO. 339, SEQ. ID. NO. 341, SEQ. ID. NO. 343, SEQ. ID. NO. 345, SEQ. ID. NO. 347, SEQ. ID. NO. 349, SEQ. ID. NO. 351, SEQ. ID. NO. 353, SEQ. ID. NO. 355, SEQ. ID. NO. 357, SEQ. ID. NO. 359, SEQ. ID. NO. 361, SEQ. ID. NO. 363, SEQ. ID. NO. 365, SEQ. ID. NO. 367, SEQ. ID. NO. 369, SEQ ID NO: 371, SEQ. ID. NO. 373, SEQ. ID. NO. 375, SEQ. ID. NO. 377, SEQ. ID. NO. 379, SEQ. ID. NO. 381, SEQ. ID. NO. 383, SEQ. ID. NO. 385, SEQ. ID. NO. 387, SEQ. ID. NO. 389, SEQ. ID. NO. 391, SEQ. ID. NO. 393, SEQ. ID. NO. 395, SEQ. ID. NO. 397, SEQ. ID. NO. 399, SEQ. ID. NO. 401, SEQ. ID. NO. 403, SEQ. ID. NO. 405, SEQ. ID. NO. 407, SEQ. ID. NO. 409, SEQ. ID. NO. 411, SEQ. ID. NO. 413, SEQ. ID. NO. 415, SEQ. ID. NO. 417, SEQ. ID. NO. 419, SEQ. ID. NO. 421, SEQ. ID. NO. 423, SEQ. ID. NO. 425, SEQ. ID. NO. 427, SEQ. ID. NO. 429, SEQ. ID. NO. 431, SEQ. ID. NO. 433, SEQ. ID. NO. 435, SEQ. ID. NO. 437, SEQ. ID. NO. 439, SEQ. ID. NO. 441, SEQ. ID. NO. 443, SEQ. ID. NO. 445, SEQ. ID. NO. 447, SEQ. ID. NO. 449, SEQ. ID. NO. 451, SEQ. ID. NO. 453, SEQ. ID. NO. 455, SEQ. ID. NO. 457, SEQ. ID. NO. 459, SEQ. ID. NO. 461, SEQ. ID. NO. 463, SEQ. ID. NO. 465, SEQ. ID. NO. 467, SEQ. ID. NO. 469, SEQ. ID. NO. 471, SEQ. ID. NO. 473, SEQ. ID. NO. 475, SEQ. ID. NO. 477, SEQ. ID. NO. 479, SEQ. ID. NO. 481, SEQ. ID. NO. 483, SEQ. ID. NO. 485, SEQ. ID. NO. 487, SEQ. ID. NO. 489, SEQ. ID. NO. 491, SEQ. ID. NO. 493, SEQ ID NO: 495, SEQ ID NO: 497, SEQ ID NO: 499, SEQ ID NO: 501, SEQ ID NO: 503, SEQ ID NO: 505, SEQ ID NO: 507, SEQ ID NO: 509 and SEQ ID NO: 511.

[0165] Preferably, the amino acid sequence identity will be at least 50-75% preferably 85%, 90%, 95%, 96%, 97%, 98%, or 99%. Optionally, the polypeptide of the assays can comprise a domain of an OR protein, such as an extracellular domain, transmembrane region, transmembrane domain, cytoplasmic domain, ligand-binding domain, subunit association domain, active site, and the like. Either the OR protein or a domain thereof can be covalently linked to a heterologous protein to create a chimeric protein used in the assays described herein. As discussed infra, the family of ORs provided herein exhibits substantial sequence similarity at both the DNA and protein level, but also significant dissimilarly. In particular, the members possess an average percentage sequence identity to other members of the family when determined over the full length of the gene by about 30%. Moreover, different members of the genes at the protein level exhibit an average on the order of about 40% sequence identity to other members of the family when the full length protein sequences are compared. However, while there exist differences, there are characteristic similarities, e.g. the consensus sequence already mentioned, which further define members of this novel genus of receptors.

[0166] Modulators of OR activity can be tested using OR polypeptides as described above, either recombinant or naturally occurring. The protein can be isolated, expressed in a cell, expressed in a membrane derived from a cell, expressed in tissue or in an animal, either recombinant or naturally occurring. Modulation can be tested using one of the in vitro or in vivo assays described herein.

[0167] 1. In Vitro Binding Assays

[0168] Olfactory transduction can also be examined in vitro with soluble or solid state reactions, using a full-length OR or a chimeric molecule such as an extracellular domain or transmembrane region, or combination thereof, of a OR covalently linked to a heterologous signal transduction domain, or a heterologous extracellular domain and/or transmembrane region covalently linked to the transmembrane and/or cytoplasmic domain of an OR. Furthermore, ligand-binding domains of the protein of interest can be used in vitro in soluble or solid state reactions to assay for ligand binding. In numerous embodiments, a chimeric receptor will be made that comprises all or part of a OR polypeptide, as well an additional sequence that facilitates the localization of the OR to the membrane, such as a rhodopsin, e.g., an N-terminal fragment of a rhodopsin protein, e.g. bovine or another mammalian rhodopsin.

[0169] Ligand binding to a OR protein, a domain, or chimeric protein can be tested in solution, in a bilayer membrane, attached to a solid phase, in a lipid monolayer, or in vesicles. Binding of a modulator can be tested using, e.g., changes in spectroscopic characteristics (e.g., fluorescence, absorbence, refractive index) hydrodynamic (e.g., shape), chromatographic, or solubility properties.

[0170] Receptor-G protein interactions can also be examined. For example, binding of the G protein to the receptor or its release from the receptor can be examined. For example, in the absence of GTP, an activator will lead to the formation of a tight complex of a G protein (all three subunits) with the receptor. This complex can be detected in a variety of ways, as noted above. Such an assay can be modified to search for inhibitors, e.g., by adding an activator to the receptor and G protein in the absence of GTP, which form a tight complex, and then screen for inhibitors by looking at dissociation of the receptor-G protein complex. In the presence of GTP, release of the alpha subunit of the G protein from the other two G protein subunits serves as a criterion of activation.

[0171] An activated or inhibited G protein will in turn alter the properties of target enzymes, channels, and other effector proteins. The classic examples are the activation of cGMP phosphodiesterase by transducin in the visual system, adenylate cyclase by the stimulatory G protein, phospholipase C by Gq and other cognate G proteins, and modulation of diverse channels by Gi and other G proteins. Downstream consequences can also be examined such as generation of diacyl glycerol and IP3 by phospholipase C, and in turn, for calcium mobilization by IP3.

[0172] In another embodiment of the invention, a GTPγS assay may be used. As described above, upon activation of a GPCR, the Gα subunit of the G protein complex is stimulated to exchange bound GDP for GTP. Ligand-mediated stimulation of G protein exchange activity can be measured in a biochemical assay measuring the binding of added radioactively-labeled GTPγ³⁵S to the G protein in the presence of a putative ligand. Typically, membranes containing the chemosensory receptor of interest are mixed with a complex of G proteins. Potential inhibitors and/or activators and GTPγS are added to the assay, and binding of GTPγS to the G protein is measured. Binding can be measured by liquid scintillation counting or by any other means known in the art, including scintillation proximity assays (SPA). In other assays formats, fluorescently-labeled GTPγS can be utilized.

[0173] 2. Fluorescence Polarization Assays

[0174] In another embodiment, Fluorescence Polarization (“FP”) based assays may be used to detect and monitor odorant binding. Fluorescence polarization is a versatile laboratory technique for measuring equilibrium binding, nucleic acid hybridization, and enzymatic activity. Fluorescence polarization assays are homogeneous in that they do not require a separation step such as centrifugation, filtration, chromatography, precipitation or electrophoresis. These assays are done in real time, directly in solution and do not require an immobilized phase. Polarization values can be measured repeatedly and after the addition of reagents since measuring the polarization is rapid and does not destroy the sample. Generally, this technique can be used to measure polarization values of fluorophores from low picomolar to micromolar levels. This section describes how fluorescence polarization can be used in a simple and quantitative way to measure the binding of odorants to the olfactory receptors of the invention.

[0175] When a fluorescently labeled molecule is excited with plane polarized light, it emits light that has a degree of polarization that is inversely proportional to its molecular rotation. Large fluorescently labeled molecules remain relatively stationary during the excited state (4 nanoseconds in the case of fluorescein) and the polarization of the light remains relatively constant between excitation and emission. Small fluorescently labeled molecules rotate rapidly during the excited state and the polarization changes significantly between excitation and emission. Therefore, small molecules have low polarization values and large molecules have high polarization values. For example, a single-stranded fluorescein-labeled oligonucleotide has a relatively low polarization value but when it is hybridized to a complementary strand, it has a higher polarization value. When using FP to detect and monitor odorant-binding which may activate or inhibit the olfactory receptors of the invention, fluorescence-labeled odorants or auto-fluorescent odorants may be used.

[0176] Fluorescence polarization (P) is defined as:

$$P = \frac{{Int}_{∐} - {Int}_{⊥}}{{Int}_{∐} + {Int}_{⊥}}$$

[0177] Where Π is the intensity of the emission light parallel to the excitation light plane and Int ⊥ is the intensity of the emission light perpendicular to the excitation light plane. P, being a ratio of light intensities, is a dimensionless number. For example, the Beacon® and Beacon 2000™ System may be used in connection with these assays. Such systems typically express polarization in millipolarization units (1 Polarization Unit=1000 mP Units).

[0178] The relationship between molecular rotation and size is described by the Perrin equation and the reader is referred to Jolley, M. E. (1991) in Journal of Analytical Toxicology, pp. 236-240, which gives a thorough explanation of this equation. Summarily, the Perrin equation states that polarization is directly proportional to the rotational relaxation time, the time that it takes a molecule to rotate through an angle of approximately 68.5° Rotational relaxation time is related to viscosity (η), absolute temperature (T), molecular volume (V), and the gas constant (R) by the following equation:

$$Rotational Relaxation Time = \frac{3 η V}{RT}$$

[0179] The rotational relaxation time is small (≈1 nanosecond) for small molecules (e.g. fluorescein) and large (≈100 nanoseconds) for large molecules (e.g. immunoglobulins). If viscosity and temperature are held constant, rotational relaxation time, and therefore polarization, is directly related to the molecular volume. Changes in molecular volume may be due to interactions with other molecules, dissociation, polymerization, degradation, hybridization, or conformational changes of the fluorescently labeled molecule. For example, fluorescence polarization has been used to measure enzymatic cleavage of large fluorescein labeled polymers by proteases, DNases, and RNases. It also has been used to measure equilibrium binding for protein/protein interactions, antibody/antigen binding, and protein/DNA binding.

[0180] 3. Solid State and Soluble High Throughput Assays

[0181] In yet another embodiment, the invention provides soluble assays using molecules such as a domain such as ligand-binding domain, an extracellular domain, a transmembrane domain (e.g., one comprising seven transmembrane regions and cytosolic loops), the transmembrane domain and a cytoplasmic domain, an active site, a subunit association region, etc.; a domain that is covalently linked to a heterologous protein to create a chimeric molecule; an OR protein; or a cell or tissue expressing an OR protein, either naturally occurring or recombinant. In another embodiment, the invention provides solid phase based in vitro assays in a high throughput format, where the domain, chimeric molecule, OR protein, or cell or tissue expressing the OR is attached to a solid phase substrate.

[0182] In the high throughput assays of the invention, it is possible to screen up to several thousand different modulators or ligands in a single day. In particular, each well of a microtiter plate can be used to run a separate assay against a selected potential modulator, or, if concentration or incubation time effects are to be observed, every 5-10 wells can test a single modulator. Thus, a single standard microtiter plate can assay about 100 (e.g., 96) modulators. If 1536 well plates are used, then a single plate can easily assay from about 1000 to about 1500 different compounds. It is also possible to assay multiple compounds in each plate well. Further,it is possible to assay several different plates per day; assay screens for up to about 6,000-20,000 different compounds is possible using the integrated systems of the invention. More recently, microfluidic approaches to reagent manipulation have been developed.

[0183] The molecule of interest can be bound to the solid state component, directly or indirectly, via covalent or non covalent linkage, e.g., via a tag. The tag can be any of a variety of components. In general, a molecule which binds the tag (a tag binder) is fixed to a solid support, and the tagged molecule of interest (e.g., the olfactory transduction molecule of interest) is attached to the solid support by interaction of the tag and the tag binder.

[0184] A number of tags and tag binders can be used, based upon known molecular interactions well described in the literature. For example, where a tag has a natural binder, for example, biotin, protein A, or protein G, it can be used in conjunction with appropriate tag binders (avidin, streptavidin, neutravidin, the Fc region of an immunoglobulin, etc.). Antibodies to molecules with natural binders such as biotin are also widely available and appropriate tag binders (see, SIGMA Immunochemicals 1998 catalogue SIGMA, St. Louis Mo.).

[0185] Similarly, any haptenic or antigenic compound can be used in combination with an appropriate antibody to form a tag/tag binder pair. Thousands of specific antibodies are commercially available and many additional antibodies are described in the literature. For example, in one common configuration, the tag is a first antibody and the tag binder is a second antibody which recognizes the first antibody. In addition to antibody-antigen interactions, receptor-ligand interactions are also appropriate as tag and tag-binder pairs. For example, agonists and antagonists of cell membrane receptors (e.g., cell receptor-ligand interactions such as transferrin, c-kit, viral receptor ligands, cytokine receptors, chemokine receptors, interleukin receptors, immunoglobulin receptors and antibodies, the cadherein family, the integrin family, the selectin family, and the like; see, e.g., Pigott & Power, The Adhesion Molecule Facts Book I (1993)). Similarly, toxins and venoms, viral epitopes, hormones (e.g., opiates, steroids, etc.), intracellular receptors (e.g., which mediate the effects of various small ligands, including steroids, thyroid hormone, retinoids and vitamin D; peptides), drugs, lectins, sugars, nucleic acids (both linear and cyclic polymer configurations), oligosaccharides, proteins, phospholipids and antibodies can all interact with various cell receptors.

[0186] Synthetic polymers, such as polyurethanes, polyesters, polycarbonates, polyureas, polyamides, polyethyleneimines, polyarylene sulfides, polysiloxanes, polyimides, and polyacetates can also form an appropriate tag or tag binder. Many other tag/tag binder pairs are also useful in assay systems described herein, as would be apparent to one of skill upon review of this disclosure.

[0187] Common linkers such as peptides, polyethers, and the like can also serve as tags, and include polypeptide sequences, such as poly gly sequences of between about 5 and 200 amino acids. Such flexible linkers are known to persons of skill in the art. For example, poly(ethelyne glycol) linkers are available from Shearwater Polymers, Inc. Huntsville, Ala. These linkers optionally have amide linkages, sulfhydryl linkages, or heterofunctional linkages.

[0188] Tag binders are fixed to solid substrates using any of a variety of methods currently available. Solid substrates are commonly derivatized or functionalized by exposing all or a portion of the substrate to a chemical reagent that fixes a chemical group to the surface which is reactive with a portion of the tag binder. For example, groups that are suitable for attachment to a longer chain portion would include amines, hydroxyl, thiol, and carboxyl groups. Aminoalkylsilanes and hydroxyalkylsilanes can be used to functionalize a variety of surfaces, such as glass surfaces. The construction of such solid phase biopolymer arrays is well described in the literature. See, e.g., Merrifield, J. Am. Chem. Soc., 85:2149-54 (1963) (describing solid phase synthesis of, e.g., peptides); Geysen et al., J. Immun. Meth., 102:259-74 (1987) (describing synthesis of solid phase components on pins); Frank & Doring, Tetrahedron, 44:60316040 (1988) (describing synthesis-of various peptide sequences on cellulose disks); Fodor et al., Science, 251:767-77 (1991); Sheldon et al., Clinical Chemistry, 39(4):718-19 (1993); and Kozal et al., Nature Medicine, 2(7):753759 (1996) (all describing arrays of biopolymers fixed to solid substrates). Non-chemical approaches for fixing tag binders to substrates include other common methods, such as heat, cross-linking by UV radiation, and the like.

[0189] 4. Computer-Based Assays

[0190] Yet another assay for compounds that modulate OR protein activity involves computer assisted compound design, in which a computer system is used to generate a three-dimensional structure of an OR protein based on the structural information encoded by its amino acid sequence. The input amino acid sequence interacts directly and actively with a preestablished algorithm in a computer program to yield secondary, tertiary, and quaternary structural models of the protein. The models of the protein structure are then examined to identify regions of the structure that have the ability to bind, e.g., ligands. These regions are then used to identify ligands that bind to the protein.

[0191] The three-dimensional structural model of the protein is generated by entering protein amino acid sequences of at least 10 amino acid residues or corresponding nucleic acid sequences encoding a OR polypeptide into the computer system. The nucleotide sequence encoding the polypeptide, or the amino acid sequence thereof, can be any of SEQ ID NO: 1, SEQ ID NO: 3, SEQ ID NO: 5, SEQ ID NO: 7, SEQ ID NO: 9, SEQ ID NO: 11, SEQ ID NO: 13, SEQ ID NO: 15, SEQ ID NO: 17, SEQ ID NO: 19, SEQ ID NO: 21, SEQ ID NO: 23, SEQ ID NO: 25, SEQ ID NO: 27, SEQ ID NO: 29, SEQ ID NO: 31, SEQ ID NO: 33, SEQ ID NO: 35, SEQ ID NO: 37, SEQ ID NO: 39, SEQ ID NO: 41, SEQ ID NO: 43, SEQ ID NO: 45, SEQ ID NO: 47, SEQ ID NO: 49, SEQ ID NO: 51, SEQ ID NO: 53, SEQ ID NO: 55, SEQ ID NO: 57, SEQ ID NO: 59, SEQ ID NO: 61, SEQ ID NO: 63, SEQ ID NO: 65, SEQ ID NO: 67, SEQ ID NO: 69, SEQ ID NO: 71, SEQ ID NO: 73, SEQ ID NO: 75, SEQ ID NO: 77, SEQ ID NO: 79, SEQ ID NO: 81, SEQ ID NO: 83, SEQ ID NO: 85, SEQ ID NO: 87, SEQ ID NO: 89, SEQ ID NO: 91, SEQ ID NO: 93, SEQ ID NO: 95, SEQ ID NO: 97, SEQ ID NO: 99, SEQ ID NO: 101, SEQ ID NO: 103, SEQ ID NO: 105, SEQ ID NO: 107, SEQ ID NO: 109, SEQ ID NO:111, SEQ ID NO:113, SEQ ID NO:115, SEQ ID NO: 117, SEQ ID NO: 119, SEQ ID NO: 121, SEQ ID NO: 123, SEQ ID NO: 125, SEQ ID NO: 127, SEQ ID NO: 129, SEQ ID NO: 131, SEQ ID NO: 133, SEQ ID NO: 135, SEQ ID NO: 137, SEQ ID NO: 139, SEQ ID NO: 141, SEQ ID NO: 143, SEQ ID NO: 145, SEQ ID NO: 147, SEQ ID NO: 149, SEQ ID NO: 151, SEQ ID NO: 153, SEQ ID NO: 155, SEQ ID NO: 157, SEQ ID NO: 159, SEQ ID NO: 161, SEQ ID NO: 163, SEQ ID NO: 165, SEQ ID NO: 167, SEQ ID NO: 169, SEQ ID NO: 171, SEQ ID NO: 173, SEQ ID NO: 175, SEQ ID NO: 177, SEQ ID NO: 179, SEQ ID NO: 181, SEQ ID NO: 183, SEQ ID NO: 185, SEQ ID NO: 187, SEQ ID NO: 189, SEQ ID NO: 191, SEQ ID NO: 193, SEQ ID NO: 195, SEQ ID NO: 197, SEQ ID NO: 199, SEQ ID NO: 201, SEQ ID NO: 203, SEQ ID NO: 205, SEQ ID NO: 207, SEQ ID NO: 209, SEQ ID NO: 211, SEQ ID NO: 213, SEQ ID NO: 215, SEQ ID NO: 217, SEQ ID NO: 219, SEQ ID NO: 221, SEQ ID NO: 223, SEQ ID NO: 225, SEQ ID NO: 227, SEQ ID NO: 229, SEQ ID NO: 231, SEQ ID NO: 233, SEQ ID NO: 235, SEQ ID NO: 237, SEQ ID NO: 239, SEQ ID NO: 241, SEQ ID NO: 243, SEQ ID NO: 245, SEQ ID NO: 247, SEQ ID NO: 249, SEQ ID NO: 251, SEQ ID NO: 253, SEQ ID NO: 255, SEQ ID NO: 257, SEQ ID NO: 259, SEQ ID NO: 261, SEQ ID NO:, 263, SEQ ID NO:, 265, SEQ ID NO: 267, SEQ ID NO: 269, SEQ ID NO: 271, SEQ ID NO: 273, SEQ ID NO: 275, SEQ ID NO: 277, SEQ ID NO: 279, SEQ ID NO: 281, SEQ ID NO: 283, SEQ ID NO: 285, SEQ ID NO: 287, SEQ ID NO: 289, SEQ ID NO: 291, SEQ ID NO: 293, SEQ ID NO: 295, SEQ ID NO: 297, SEQ ID NO: 299, SEQ ID NO: 301, SEQ ID NO: 303, SEQ ID NO: 305, SEQ ID NO: 307, SEQ ID NO: 309, SEQ ID NO: 311, SEQ ID NO: 313, SEQ ID NO: 315, SEQ ID NO: 317, SEQ ID NO: 319, SEQ ID NO: 321, SEQ ID NO: 323, SEQ ID NO: 325, SEQ ID NO: 327, SEQ ID NO: 329, SEQ ID NO: 331, SEQ ID NO: 333, SEQ ID NO: 335, SEQ ID NO: 337, SEQ ID NO: 339, SEQ ID NO: 341, SEQ ID NO: 343, SEQ ID NO: 345, SEQ ID NO: 347, SEQ ID NO: 349, SEQ ID NO: 351, SEQ ID NO: 353, SEQ ID NO: 355, SEQ ID NO: 357, SEQ ID NO: 359, SEQ ID NO: 361, SEQ ID NO: 363, SEQ ID NO: 365, SEQ ID NO: 367, SEQ ID NO: 369, SEQ ID NO: 371, SEQ ID NO: 373, SEQ ID NO: 375, SEQ ID NO: 377, SEQ ID NO: 379, SEQ ID NO: 381, SEQ ID NO: 383, SEQ ID NO: 385, SEQ ID NO: 387, SEQ ID NO: 389, SEQ ID NO: 391, SEQ ID NO: 393, SEQ ID NO: 395, SEQ ID NO: 397, SEQ ID NO: 399, SEQ ID NO: 401, SEQ ID NO: 403, SEQ ID NO: 405, SEQ ID NO: 407, SEQ ID NO: 409, SEQ ID NO: 411, SEQ ID NO: 413, SEQ ID NO: 415, SEQ ID NO: 417, SEQ ID NO: 419, SEQ ID NO: 421, SEQ ID NO: 423, SEQ ID NO: 425, SEQ ID NO: 427, SEQ ID NO: 429, SEQ ID NO: 431, SEQ ID NO: 433, SEQ ID NO: 435, SEQ ID NO: 437, SEQ ID NO: 439, SEQ ID NO: 441, SEQ ID NO: 443, SEQ ID NO: 445, SEQ ID NO: 447, SEQ ID NO: 449, SEQ ID NO: 451, SEQ ID NO: 453, SEQ ID NO: 455, SEQ ID NO: 457, SEQ ID NO: 459, SEQ ID NO: 461, SEQ ID NO: 463, SEQ ID NO: 465, SEQ ID NO: 467, SEQ ID NO: 469, SEQ ID NO: 471, SEQ ID NO: 473, SEQ ID NO: 475, SEQ ID NO: 477, SEQ ID NO: 479, SEQ ID NO: 481, SEQ ID NO: 483, SEQ ID NO: 485, SEQ ID NO: 487, SEQ ID NO: 489, SEQ ID NO: 491, SEQ ID NO: 493, SEQ ID NO: 495, SEQ ID NO: 497, SEQ ID NO: 499, SEQ ID NO: 501, SEQ ID NO: 503, SEQ ID NO: 505, SEQ ID NO: 507, SEQ ID NO: 509 and SEQ ID NO: 511, and conservatively modified versions thereof.

[0192] The amino acid sequence represents the primary sequence or subsequence of the protein, which encodes the structural information of the protein. At least 10 residues of the amino acid sequence (or a nucleotide sequence encoding 10 amino acids) are entered into the computer system from computer keyboards, computer readable substrates that include, but are not limited to, electronic storage media (e.g., magnetic diskettes, tapes, cartridges, and chips), optical media (e.g., CD ROM), information distributed by internet sites, and by RAM. The three-dimensional structural model of the protein is then generated by the interaction of the amino acid sequence and the computer system, using software known to those of skill in the art.

[0193] The amino acid sequence represents a primary structure that encodes the information necessary to form the secondary, tertiary and quaternary structure of the protein of interest. The software looks at certain parameters encoded by the primary sequence to generate the structural model. These parameters are referred to as “energy terms,” and primarily include electrostatic potentials, hydrophobic potentials, solvent accessible surfaces, and hydrogen bonding. Secondary energy terms include van der Waals potentials. Biological molecules form the structures that minimize the energy terms in a cumulative fashion. The computer program is therefore using these terms encoded by the primary structure or amino acid sequence to create the secondary structural model.

[0194] The tertiary structure of the protein encoded by the secondary structure is then formed on the basis of the energy terms of the secondary structure. The user at this point can enter additional variables such as whether the protein is membrane bound or soluble, its location in the body, and its cellular location, e.g., cytoplasmic, surface, or nuclear. These variables along with the energy terms of the secondary structure are used to form the model of the tertiary structure. In modeling the tertiary structure, the computer program matches hydrophobic faces of secondary structure with like, and hydrophilic faces of secondary structure with like.

[0195] Once the structure has been generated, potential ligand-binding regions are identified by the computer system. Three-dimensional structures for potential ligands are generated by entering amino acid or nucleotide sequences or chemical formulas of compounds, as described above. The three-dimensional structure of the potential ligand is then compared to that of the OR protein to identify ligands that bind to the protein. Binding affinity between the protein and ligands is determined using energy terms to determine which ligands have an enhanced probability of binding to the protein.

[0196] Computer systems are also used to screen for mutations, polymorphic variants, alleles and interspecies homologs of OR genes. Such mutations can be associated with disease states or genetic traits. As described above, GeneChip™ and related technology can also be used to screen for mutations, polymorphic variants, alleles and interspecies homologs. Once the variants are identified, diagnostic assays can be used to identify patients having such mutated genes. Identification of the mutated OR genes involves receiving input of a first nucleic acid or amino acid sequence of a OR gene, or conservatively modified versions thereof. The sequence is entered into the computer system as described above. The first nucleic acid or amino acid sequence is then compared to a second nucleic acid or amino acid sequence that has substantial identity to the first sequence. The second sequence is entered into the computer system in the manner described above. Once the first and second sequences are compared, nucleotide or amino acid differences between the sequences are identified. Such sequences can represent allelic differences in various OR genes, and mutations associated with disease states and genetic traits.

[0197] 5. Cell-Based Binding Assays

[0198] In a preferred embodiment, an OR polypeptide is expressed in a eukaryotic cell as a chimeric receptor with a heterologous, chaperone sequence that facilitates its maturation and targeting through the secretory pathway. In a preferred embodiment, the heterologous sequence is a rhodopsin sequence, such as an N-terminal fragment of a rhodopsin. Such chimeric OR receptors can be expressed in any eukaryotic cell, such as HEK-293 cells. Preferably, the cells comprise a functional G protein, e.g., Gα15, that is capable of coupling the chimeric receptor to an intracellular signaling pathway or to a signaling protein such as phospholipase C. Activation of such chimeric receptors in such cells can be detected using any standard method, such as by detecting changes in intracellular calcium by detecting FURA-2 dependent fluorescence in the cell.

[0199] Activated GPCR receptors become substrates for kinases that phosphorylate the C-terminal tail of the receptor (and possibly other sites as well). Thus, activators will promote the transfer of ³²P from gamma-labeled GTP to the receptor, which can be assayed with a scintillation counter. The phosphorylation of the C-terminal tail will promote the binding of arrestin-like proteins and will interfere with the binding of G proteins. The kinase/arrestin pathway plays a key role in the desensitization of many GPCR receptors. For example, compounds that modulate the duration an olfactory receptor stays active would be useful as a means of prolonging a desired odor or cutting off an unpleasant one. For a general review of GPCR signal transduction and methods of assaying signal transduction, see, e.g., Methods in Enzymology, vols. 237 and 238 (1994) and volume 96 (1983); Bourne et al., Nature, 10:349:117-27 (1991); Bourne et al., Nature, 348:125-32 (1990); Pitcher et al., Annu. Rev. Biochem., 67:653-92 (1998).

[0200] OR modulation may be assayed by comparing the response of an OR polypeptide treated with a putative OR modulator to the response of an untreated control sample. Such putative OR modulators can include odorants that either inhibit or activate OR polypeptide activity. In one embodiment, control samples (untreated with activators or inhibitors) are assigned a relative OR activity value of 100. Inhibition of an OR polypeptide is achieved when the OR activity value relative to the control is about 90%, optionally 50%, optionally 25-0%. Activation of an OR polypeptide is achieved when the OR activity value relative to the control is 110%, optionally 150%, 200-500%, or 1000-2000%.

[0201] Changes in ion flux may be assessed by determining changes in polarization (i.e., electrical potential) of the cell or membrane expressing a OR protein. One means to determine changes in cellular polarization is by measuring changes in current (thereby measuring changes in polarization) with voltage-clamp and patch-clamp techniques, e.g., the “cell-attached” mode, the “inside-out” mode, and the “whole cell” mode (see, e.g., Ackerman et al., New Engl. J Med., 336:1575-1595 (1997)). Whole cell currents are conveniently determined using the standard. Other known assays include: radiolabeled ion flux assays and fluorescence assays using voltage-sensitive dyes (see, e.g., Vestergarrd-Bogind et al., J. Membrane Biol., 88:67-75 (1988); Gonzales & Tsien, Chem. Biol., 4:269277 (1997); Daniel et al., J. Pharmacol. Meth., 25:185-193 (1991); Holevinsky et al., J. Membrane Biology, 137:59-70 (1994)). Generally, the compounds to be tested are present in the range from 1 pM to 100 mM.

[0202] The effects of the test compounds upon the function of the polypeptides can be measured by examining any of the parameters described above. Any suitable physiological change that affects GPCR activity can be used to assess the influence of a test compound on the polypeptides of this invention. When the functional consequences are determined using intact cells or animals, one can also measure a variety of effects such as transmitter release, hormone release, transcriptional changes to both known and uncharacterized genetic markers (e.g., northern blots), changes in cell metabolism such as cell growth or pH changes, and changes in intracellular second messengers such as Ca²⁺, IP3, cGMP, or cAMP.

[0203] Preferred assays for GPCRs include cells that are loaded with ion or voltage sensitive dyes to report receptor activity. Assays for determining activity of such receptors can also use known agonists and antagonists for other G protein coupled receptors as negative or positive controls to assess activity of tested compounds. In assays for identifying modulatory compounds (e.g., agonists, antagonists), changes in the level of ions in the cytoplasm or membrane voltage will be monitored using an ion sensitive or membrane voltage fluorescent indicator, respectively. Among the ion-sensitive indicators and voltage probes that may be employed are those disclosed in the Molecular Probes 1997 Catalog. For G protein coupled receptors, promiscuous G proteins such as Gα15 and Gα16 can be used in the assay of choice (Wilkie et al., PNAS, 88:10049-53 (1991)). Such promiscuous G proteins allow coupling of a wide range of receptors.

[0204] Receptor activation typically initiates subsequent intracellular events, e.g., increases in second messengers such as IP3, which releases intracellular stores of calcium ions. Activation of some G protein coupled receptors stimulates the formation of inositol triphosphate (IP3) through phospholipase C-mediated hydrolysis of phosphatidylinositol (Berridge & Irvine, Nature, 312:315-21 (1984)). IP3 in turn stimulates the release of intracellular calcium ion stores. Thus, a change in cytoplasmic calcium ion levels, or a change in second messenger levels such as IP3 can be used to assess G protein coupled receptor function. Cells expressing such G protein coupled receptors may exhibit increased cytoplasmic calcium levels as a result of contribution from both intracellular stores and via activation of ion channels, in which case it may be desirable although not necessary to conduct such assays in calcium-free buffer, optionally supplemented with a chelating agent such as EGTA, to distinguish fluorescence response resulting from calcium release from internal stores.

[0205] Other assays can involve determining the activity of receptors which, when activated, result in a change in the level of intracellular cyclic nucleotides, e.g., cAMP or cGMP, by activating or inhibiting enzymes such as adenylate cyclase. There are cyclic nucleotide-gated ion channels, e.g., rod photoreceptor cell channels and olfactory neuron channels that are permeable to cations upon activation by binding of cAMP or cGMP (see, e.g., Altenhofen et al, PNAS, 88:9868-72 (1991) and Dhallan et al., Nature, 347:184-187 (1990)). In cases where activation of the receptor results in a decrease in cyclic nucleotide levels, it may be preferable to expose the cells to agents that increase intracellular cyclic nucleotide levels, e.g., forskolin, prior to adding a receptor-activating compound to the cells in the assay. Cells for this type of assay can be made by co-transfection of a host cell with DNA encoding a cyclic nucleotide-crated ion channel, GPCR phosphatase and DNA encoding a receptor (e.g., certain glutamate receptors, muscarinic acetylcholine receptors, dopamine receptors, serotonin receptors, and the like), which, when activated, causes a change in cyclic nucleotide levels in the cytoplasm.

[0206] In a preferred embodiment, OR protein activity is measured by expressing a OR gene in a heterologous cell with a promiscuous G protein that links the receptor to a phospholipase C signal transduction pathway (see Offermanns & Simon, J. Biol. Chem., 270:15175-15180 (1995)). Optionally the cell line is HEK-293 (which does not naturally express OR genes) and the promiscuous G protein is Gα15/Gα16 (Offermanns & Simon, supra). Modulation of olfactory transduction is assayed by measuring changes in intracellular Ca²⁺ levels, which change in response to modulation of the OR signal transduction pathway via administration of a molecule that associates with a OR protein. Changes in Ca2+ levels are optionally measured using fluorescent Ca²⁺ indicator dyes and fluorometric imaging.

[0207] In one embodiment, the changes in intracellular cAMP or cGMP can be measured using immunoassays. The method described in Offermanns & Simon, J. Bio. Chem., 270:15175-15180 (1995), may be used to determine the level of cAMP. Also, the method described in Felley-Bosco et al., Am. J. Resp. Cell and Mol. Biol., 11: 159-164 (1994), may be used to determine the level of cGMP. Further, an assay kit for measuring cAMP and/or cGMP is described in U.S. Pat. No. 4,115,538, herein incorporated by reference.

[0208] In another embodiment, phosphatidyl inositol (PI) hydrolysis can be analyzed according to U.S. Pat. No. 5,436,128, herein incorporated by reference. Briefly, the assay involves labeling of cells with 3H-myoinositol for 48 or more hrs. The labeled cells are treated with a test compound for one hour. The treated cells are lysed and extracted in chloroform-methanol-water after which the inositol phosphates were separated by ion exchange chromatography and quantified by scintillation counting. Fold stimulation is determined by calculating the ratio of cpm in the presence of agonist, to cpm in the presence of buffer control. Likewise, fold inhibition is determined by calculating the ratio of cpm in the presence of antagonist, to cpm in the presence of buffer control (which may or may not contain an agonist).

[0209] In another embodiment, transcription levels can be measured to assess the effects of a test compound on signal transduction. A host cell containing an OR protein of interest is contacted with a test compound for a sufficient time to effect any interactions, and then the level of gene expression is measured. The amount of time to effect such interactions may be empirically determined, such as by running a time course and measuring the level of transcription as a function of time. The amount of transcription may be measured by using any method known to those of skill in the art to be suitable. For example, mRNA expression of the protein of interest may be detected using northern blots or their polypeptide products may be identified using immunoassays. Alternatively, transcription based assays using reporter gene may be used as described in U.S. Pat. No. 5,436,128, herein incorporated by reference. The reporter genes can be, e.g., chloramphenicol acetyltransferase, luciferase, '3-galactosidase and alkaline phosphatase. Furthermore, the protein of interest can be used as an indirect reporter via attachment to a second reporter such as green fluorescent protein (see, e.g., Mistili & Spector, Nature Biotechnology, 15:961-64 (1997)).

[0210] The amount of transcription is then compared to the amount of transcription in either the same cell in the absence of the test compound, or it may be compared with the amount of transcription in a substantially identical cell that lacks the OR protein of interest. A substantially identical cell may be derived from the same cells from which the recombinant cell was prepared but which had not been modified by introduction of heterologous DNA. Any difference in the amount of transcription indicates that the test compound has in some manner altered the activity of the OR protein of interest.

[0211] 6. Transgenic Non-Human Animals Expressing Olfactory Receptors

[0212] Non-human animals expressing one or more olfactory receptor sequences of the invention, particularly human olfactory receptor sequences, can also be used for receptor assays. Such expression can be used to determine whether a test compound specifically binds to a mammalian olfactory transmembrane receptor polypeptide in vivo by contacting a non-human animal stably or transiently transfected with a nucleic acid encoding an olfactory receptor or ligand-binding region thereof with a test compound and determining whether the animal reacts to the test compound by specifically binding to the receptor polypeptide.

[0213] Use of the translocation domains of the invention in the fusion polypeptides generates a cell expressing high levels of olfactory receptor. Animals transfected or infected with the vectors of the invention are particularly useful for assays to identify and characterize odorants/ligands that can bind to a specific or sets of receptors. Such vector-infected animals expressing libraries of human olfactory sequences can be used for in vivo screening of odorants and their effect on, e.g., cell physiology (e.g., on olfactory neurons), on the CNS (e.g., olfactory bulb activity), or behavior.

[0214] Means to infect/express the nucleic acids and vectors, either individually or as libraries, are well known in the art. A variety of individual cell, organ or whole animal parameters can be measured by a variety of means. For example, recording of stimulant-induced waves (bulbar responses) from the main olfactory bulb or accessory olfactory bulb is a useful tool for measuring quantitative stable olfactory responses. When electrodes are located on the olfactory bulb surface it is possible to record stable responses over a period of several days (see, e.g., Kashiwayanagi, Brain Res. Protoc. 1:287-291 (1997)). In this study, electroolfactogram recordings were made with a four-electrode assembly from the olfactory epithelium overlying the endoturbinate bones facing the nasal septum. Four electrodes were fixed along the dorsal-to-ventral axis of one turbinate bone or were placed in corresponding positions on four turbinate bones and moved together up toward the top of the bone. See also, Scott, J. Neurophysiol. 77:1950-1962 (1997); Scott, J. Neurophysiol. 75:2036-2049 (1996); Ezeh, J. Neurophysiol. 73:2207-2220 (1995). In other systems, fluorescence changes in nasal epithelium can be measured using the dye di-4-ANEPPS, which is applied on the rat's nasal septum and medial surface of the turbinates (see, e.g., Youngentob, J. Neurophysiol. 73:387-398 (1995)). Extracellular potassium activity (aK) measurements can also be carried out in in vivo. An increase in aK can be measured in the mucus and the proximal part of the nasal epithelium (see, e.g., Khayari, Brain Res. 539:1-5 (1991)).

[0215] The OR sequences of the invention can be for example expressed in animal nasal epithelium by delivery with an infecting agent, e.g., adenovirus expression vector. Recombinant adenovirus-mediated expression of a recombinant gene in olfactory epithelium using green fluorescent protein as a marker is described by, e.g., Touhara, PNAS, 96:4040-45 (1999).

[0216] The endogenous olfactory receptor genes can remain functional and wild-type (native) activity can still be present. In other situations, where it is desirable that all olfactory receptor activity is by the introduced exogenous hybrid receptor, use of a knockout line is preferred. Methods for the construction of non-human transgenic animals, particularly transgenic mice, and the selection and preparation of recombinant constructs for generating transformed cells are well known in the art.

[0217] Construction of a “knockout” cell and animal is based on the premise that the level of expression of a particular gene in a mammalian cell can be decreased or completely abrogated by introducing into the genome a new DNA sequence that serves to interrupt some portion of the DNA sequence of the gene to be suppressed. Also, “gene trap insertion” can be used to disrupt a host gene, and mouse embryonic stem (ES) cells can be used to produce knockout transgenic animals (see, e.g., Holzschu, Transgenic Res 6:97-106 (1997)). The insertion of the exogenous is typically by homologous recombination between complementary nucleic acid sequences. The exogenous sequence is some portion of the target gene to be modified, such as exonic, intronic or transcriptional regulatory sequences, or any genomic sequence which is able to affect the level of the target gene's expression; or a combination thereof. Gene targeting via homologous recombination in pluripotential embryonic stem cells allows one to modify precisely the genomic sequence of interest. Any technique can be used to create, screen for, propagate, a knockout animal, e.g., see Bijvoet, Hum. Mol. Genet. 7:53-62 (1998); Moreadith, J. Mol. Med. 75:208-216 (1997); Tojo, Cytotechnology 19:161-165 (1995); Mudgett, Methods Mol. Biol. 48:167-184 (1995); Longo, Transgenic Res. 6:321-328 (1997); U.S. Pat. Nos. 5,616,491; 5,464,764; 5,631,153; 5,487,992; 5,627,059; 5,272,071; WO 91/09955; WO 93/09222; WO 96/29411; WO 95/31560; WO 91/12650.

[0218] The nucleic acid libraries of the invention can also be used as reagents to produce “knockout” human cells and their progeny. Likewise, the nucleic acids of the invention can also be used as reagents to produce “knock-ins” in mice. The human or rat OR gene sequences can replace the orthologous ORs in the mouse genome. In this way, a mouse expressing a human or rat OR can be produced. This mouse can then be used to analyze the function of human or rat ORs, and to identify ligands for such ORs.

F. Modulators

[0219] The compounds tested as modulators of an OR family member can be any small chemical compound, or a biological entity, such as a protein, sugar, nucleic acid or lipid. Alternatively, modulators can be genetically altered versions of an OR gene. Typically, test compounds will be small chemical molecules and peptides. Essentially any chemical compound can be used as a potential modulator or ligand in the assays of the invention, although most often compounds can be dissolved in aqueous or organic (especially DMSO-based) solutions are used. The assays are designed to screen large chemical libraries by automating the assay steps and providing compounds from any convenient source to assays, which are typically run in parallel (e.g., in microtiter formats on microtiter plates in robotic assays). It will be appreciated that there are many suppliers of chemical compounds, including Sigma (St. Louis, Mo.), Aldrich (St. Louis, Mo.), Sigma-Aldrich (St. Louis, Mo.), Fluka Chemika-Biochemica Analytika (Buchs, Switzerland) and the like.

[0220] The OR modulating compounds can be used in any number of consumer products, including, but not limited to, purfumes, fragrance compositions, deorderants, air fresheners, foods, drugs, etc., or ingredients thereof, to thereby modulate the odor of the product, composition, or ingredient in a desired manner. As one of skill in the art will recognize, OR modulating compounds can be used to enhance desireable odors, to block malodors, or a combination thereof.

[0221] In one preferred embodiment, high throughput screening methods involve providing a combinatorial chemical or peptide library containing a large number of potential therapeutic compounds (potential modulator or ligand compounds). Such “combinatorial chemical libraries” or “ligand libraries” are then screened in one or more assays, as described herein, to identify those library members (particular chemical species or subclasses) that display a desired characteristic activity. The compounds thus identified can serve as conventional “lead compounds” or can themselves be used as potential or actual odorant compositions.

[0222] A combinatorial chemical library is a collection of diverse chemical compounds generated by either chemical synthesis or biological synthesis, by combining a number of chemical “building blocks” such as reagents. For example, a linear combinatorial chemical library such as a polypeptide library is formed by combining a set of chemical building blocks (amino acids) in every possible way for a given compound length (i.e., the number of amino acids in a polypeptide compound). Millions of chemical compounds can be synthesized through such combinatorial mixing of chemical building blocks.

[0223] Preparation and screening of combinatorial chemical libraries is well known to those of skill in the art. Such combinatorial chemical libraries include, but are not limited to, peptide libraries (see, e.g., U.S. Pat. No. 5,010,175, Furka, Int. J. Pept. Prot. Res., 37:487-93 (1991) and Houghton et al., Nature, 354:84-88 (1991)). Other chemistries for generating chemical diversity libraries can also be used. Such chemistries include, but are not limited to: peptoids (e.g., PCT Publication No. WO 91/19735), encoded peptides (e.g., PCT Publication WO 93/20242), random bio-oligomers (e.g., PCT Publication No. WO 92/00091), benzodiazepines (e.g., U.S. Pat. No. 5,288,514), diversomers such as hydantoins, benzodiazepines and dipeptides (Hobbs et al., PNAS, 90:6909-13 (1993)), vinylogous polypeptides (Hagihara et al., J. Amer. Chem. Soc., 114:6568 (1992)), nonpeptidal peptidomimetics with glucose scaffolding (Hirschmann et al., J. Amer. Chem. Soc., 114:9217-18 (1992)), analogous organic syntheses of small compound libraries (Chen et al., J. Amer. Chem. Soc., 116:2661 (1994)), oligocarbamates (Cho et al., Science, 261:1303 (1993)), peptidyl phosphonates (Campbell et al., J. Org. Chem., 59:658 (1994)), nucleic acid libraries (Ausubel, Berger and Sambrook, all supra), peptide nucleic acid libraries (U.S. Pat. No. 5,539,083), antibody libraries (Vaughn et al., Nature Biotechnology, 14(3):309-14 (1996) and PCT/US96/10287), carbohydrate libraries (Liang et al., Science, 274:1520-22 (1996) and U.S. Pat. No. 5,593,853), small organic molecule libraries (benzodiazepines, Baum, C&EN, Jan. 18, page 33 (1993); thiazolidinones and metathiazanones, U.S. Pat. No. 5,549,974; pynrolidines, U.S. Pat. Nos. 5,525,735 and 5,519,134; morpholino compounds, U.S. Pat. No. 5,506,337; benzodiazepines, U.S. Pat. No. 5,288,514, and the like).

[0224] Devices for the preparation of combinatorial libraries are commercially available (see, e.g., 357 MPS, 390 MPS (Advanced Chem Tech, Louisville Ky.), Symphony (Rainin, Woburn, Mass.), 433A (Applied Biosystems, Foster City, Calif.), 9050 Plus (Millipore, Bedford, Mass.)). In addition, numerous combinatorial libraries are themselves commercially available (see, e.g., ComGenex, Princeton, N.J.; Tripos, Inc., St. Louis, Mo.; 3D Pharmaceuticals, Exton, Pa.; Martek Biosciences; Columbia, Md.; etc.).

G. Methods for Representing and Predicting the Perception of Odor

[0225] The invention also preferably provides methods for representing the perception of odor (or taste) and/or for predicting the perception of odor (or taste) in a mammal, including in a human. Preferably, such methods may be performed by using the receptors and genes encoding said olfactory receptors disclosed herein.

[0226] Also contemplated as within the invention, is a method of screening one or more compounds for the presence of an odor detectable by a mammal, comprising: contacting said one or more compounds with the disclosed receptors, preferably wherein the mammal is a human. Also contemplated as within the invention is a method for representing olfactory perception of a particular smell in a mammal, comprising: providing values X₁ to Xₙ representative of the quantitative stimulation of each of n olfactory receptors of said vertebrate, where n is greater than or equal to 4; and generating from said values a quantitative representation of olfactory perception. The olfactory receptors may be an olfactory receptor disclosed herein, the representation may constitutes a point or a volume in n-dimensional space, may constitutes a graph or a spectrum, and may constitutes a matrix of quantitative representations. Also, the providing step may comprise contacting a plurality of recombinantly-produced olfactory receptors with a test composition and quantitatively measuring the interaction of said composition with said receptors.

[0227] Also contemplated as within the invention, is a method for predicting the olfactory perception in a mammal generated by one or more molecules or combinations of molecules yielding unknown olfactory perception in a mammal, comprising: providing values X₁ to Xₙ representative of the quantitative stimulation of each of n olfactory receptors of said vertebrate, where n is greater than or equal to 4, for one or more molecules or combinations of molecules yielding known olfactory perception in a mammal; and generating from said values a quantitative representation of olfactory perception in a mammal for the one or more molecules or combinations of molecules yielding known olfactory perception in a mammal, providing values X₁ to Xₙ representative of the quantitative stimulation of each of n olfactory receptors of said vertebrate, where n is greater than or equal to 4, for one or more molecules or combinations of molecules yielding unknown olfactory perception in a mammal; and generating from said values a quantitative representation of olfactory perception in a mammal for the one or more molecules or combinations of molecules yielding unknown olfactory perception in a mammal, and predicting the olfactory perception in a mammal generated by one or more molecules or combinations of molecules yielding unknown olfactory perception in a mammal by comparing the quantitative representation of olfactory perception in a mammal for the one or more molecules or combinations of molecules yielding unknown olfactory perception in a mammal to the quantitative representation of olfactory perception in a mammal for the one or more molecules or combinations of molecules yielding known olfactory perception in a mammal. The olfactory receptors used in this method may include an olfactory receptor disclosed herein.

[0228] In another embodiment, novel molecules or combinations of molecules are generated which elicit a predetermined olfactory perception in a mammal by determining a value of olfactory perception in a mammal for a known molecule or combinations of molecules as described above; determining a value of olfactory perception in a mammal for one or more unknown molecules or combinations of molecules as described above; comparing the value of olfactory perception in a mammal for one or more unknown compositions to the value of olfactory perception in a mammal for one or more known compositions; selecting a molecule or combination of molecules that elicits a predetermined olfactory perception in a mammal; and combining two or more unknown molecules or combinations of molecules to form a molecule or combination of molecules that elicits a predetermined olfactory perception in a mammal. The combining step yields a single molecule or a combination of molecules that elicits a predetermined olfactory perception in a mammal.

[0229] In another embodiment of the invention, there is provided a method for simulating a fragrance, comprising: for each of a plurality of cloned olfactory receptors, preferably human receptors, ascertaining the extent to which the receptor interacts with the fragrance; and combining a plurality of compounds, each having a previously-ascertained interaction with one or more of the receptors, in amounts that together provide a receptor-stimulation profile that mimics the profile for the fragrance. Interaction of a fragrance with an olfactory receptor can be determined using any of the binding or reporter assays described herein. The plurality of compounds may then be combined to form a mixture. If desired, one or more of the plurality of the compounds can be combined covalently. The combined compounds substantially stimulate at least 75%, 80% or 90% of the receptors that are substantially stimulated by the fragrance.

[0230] In another preferred embodiment of the invention, a plurality of standard compounds are tested against a plurality of olfactory receptors to ascertain the extent to which the receptors each interact with each standard compound, thereby generating a receptor stimulation profile for each standard compound. These receptor stimulation profiles may then be stored in a relational database on a data storage medium. The method may further comprise providing a desired receptor-stimulation profile for a scent; comparing the desired receptor stimulation profile to the relational database; and ascertaining one or more combinations of standard compounds that most closely match the desired receptor-stimulation profile. The method may further comprise combining standard compounds in one or more of the ascertained combinations to simulate the scent.

H. Kits

[0231] OR genes and their homologs are useful tools for identifying olfactory receptor cells, for forensics and paternity determinations, and for examining olfactory transduction. OR family member-specific reagents that specifically hybridize to OR nucleic acids, such as AOLFR1 probes and primers, and OR family member-specific reagents that specifically bind to an OR protein, e.g., OR antibodies are used to examine olfactory cell expression and olfactory transduction regulation.

[0232] Nucleic acid assays for the presence of DNA and RNA for an OR family member in a sample include numerous techniques are known to those skilled in the art, such as southern analysis, northern analysis, dot blots, RNase protection, S1 analysis, amplification techniques such as PCR, and in situ hybridization. In in situ hybridization, for example, the target nucleic acid is liberated from its cellular surroundings in such a form so as to be available for hybridization within the cell, while preserving the cellular morphology for subsequent interpretation and analysis. The following articles provide an overview of the art of in situ hybridization: Singer et al., Biotechniques, 4:230-50 (1986); Haase et al., Methods in Virology, vol. VII, pp. 189-226 (1984); and Nucleic Acid Hybridization: A Practical Approach (Names et al., eds. 1987). In addition, an OR protein can be detected with the various immunoassay techniques described above. The test sample is typically compared to both a positive control (e.g., a sample expressing a recombinant OR protein) and a negative control.

[0233] The present invention also provides for kits for screening for modulators of OR family members. Such kits can be prepared from readily available materials and reagents. For example, such kits can comprise any one or more of the following materials: OR nucleic acids or proteins, reaction tubes, and instructions for testing OR activity. Optionally, the kit contains a biologically active OR receptor. A wide variety of kits and components can be prepared according to the present invention, depending upon the intended user of the kit and the particular needs of the user.

### EXAMPLES

[0234] Genomic, predicted amino acid sequence, and predicted coding sequences (cds), of novel G protein-coupled human odorant receptors, and classes of such receptors, are described. Each example describes a discrete protein and nucleic acid pair. Accordingly, Example 1 describes SEQ. ID. NOS. 1 and 2, for the human olfactory receptor protein designated AOLFR1, and the human DNA encoding AOLFR1, respectively; Example 2 describes SEQ. ID. NOS. 3 and 4, for the human olfactory receptor protein designated AOLFR2, and the human DNA encoding AOLFR2, respectively; and so on in the manner described, through the final Example sequence.

[0235] In the protein sequences presented herein, the one-letter code X or Xaa refers to any of the twenty common amino acid residues. In the DNA sequences presented herein, the one letter codes N or n refers to any of the of the four common nucleotide bases, A, T, C, or G.

EXAMPLES

| | |
|---|---|
| AOLFR1 sequences: | |
| MKTFSSFLQIGRNMHQGNQTTITEFILLGFFKQDEHQNLLFVLFLGMYLVTVIGNGLIIVAISLD | (SEQ ID NO: 1) |
| TYLHTPMYLFLANLSFADISSISNSVPKMLVNIQTKSQSISYESCITQMYFSIVFVVIDNLLLGTM | |
| AYDHFVAICHPLNYTILMRPRFGILLTVISWFLSNIIALTHTLLLIQLLFCNHNTLPHFFCDLAPLL | |
| KLSCSDTLINELVLFIVGLSVIIFPFTLSFFSYVCIIRAVLRVSSTQGKWKAFSTCGSHLTVVLLFY | |
| GTIVGVYFFPSSTHPEDTDKIGAVLFTVVTPMINPFIYSLRNKDMKGALRKLINRKISSL | |
| ATGAAGACTTTTAGTTCCTTTCTTCAGATCGGCAGAAATATGCATCAAGGAAACCAAACCA | (SEQ ID NO: 2) |
| CCATCACTGAATTCATTCTCCTGGGATTTTTCAAGCAGGATGAGCATCAAAACCTCCTCTTT | |
| GTGCTTTTCTTGGGTATGTACCTGGTCACTGTGATTGGGAACGGGCTCATCATTGTGGCTA | |
| TCAGCTTGGATACGTACCTTCATACCCCCATGTATCTCTTCCTTGCCAATCTATCCTTTGCT | |
| GATATTTCCTCCATTTCCAACTCAGTCCCCAAAATGCTGGTGAATATTCAAACCAAGAGTC | |
| AATCCATCTCTTATGAGAGCTGCATCACACAGATGTACTTTTCTATTGTGTTTGTCGTCATT | |
| GACAATTTGCTCTTGGGGACCATGGCCTATGACCACTTTGTGGCGATCTGCCACCCTCTGA | |
| ATTATACAATTCTCATGCGGCCCAGGTTCGGCATTTTGCTCACAGTCATCTCATGGTTCCTC | |
| AGTAATATTATTGCTCTGACACACACCCTTCTGCTCATTCAATTGCTCTTCTGTAACCACAA | |
| CACTCTCCCACACTTCTTCTGTGACTTGGCCCCTCTGCTCAAACTGTCCTGTTCAGATACAT | |
| TGATCAATGAGCTTGTGTTGTTTATTGTGGGTTTATCAGTTATCATCTTCCCCTTTACACTC | |
| AGCTTCTTTTCCTATGTCTGCATCATCAGAGCTGTCCTGAGAGTATCTTCCACACAGGGAA | |
| AGTGGAAAGCCTTCTCCACTTGTGGCTCTCACCTGACAGTTGTATTACTGTTCTACGGAAC | |
| CATTGTAGGCGTGTACTTTTTCCCCTCCTCCACTCACGCTGAGGACACTGATAAGATTGGT | |
| GCTGTCCTATTCACTGTGGTGACACCCATGATAAACCCCTTCATCTACAGCTTGAGGAATA | |
| AGGATATGAAAGGTGCCCTGAGAAAGCTCATCAATAGAAAAATTTCTTCCCTTTGA | |
| AOLFR2 sequences: | |
| MMMVLRNLSMEPTFALLGFTDYPKLQIPLFLVFLLMYVITVVGNLGMIIIIKINPKFHTPMYFFL | (SEQ ID NO: 3) |
| SHLSFVDFCYSSIVTPKLLENLVMADKSIFYFSCMMQYFLSCTAVVTESFLLAVMAYDRFVAIC | |
| NPLLYTVAMSQRLCALLVAGSYLWGMFGPLVLLCYALRINFSGPNVINHFFCEYTALISVSGS | |
| DILIPHLLLFSFATFNEMCTLLIILTSYVFIFVTVLKIRSVSGRHKAFSTWASHLTAITIFHGTILFL | |
| YCVPNSKINSRQTVKVASVFYTVVNPMLNPPIYSLRNKDVKDAYWKLIHTQVPFH | |
| ATGATGATGGTTTTAAGGAATCTGAGCATGGAGCCCACCTTTGCCCTTTTAGGTTTCACAG | (SEQ ID NO: 4) |
| ATTACCCAAAGCTTCAGATTCCTCTCTTCCTTGTGTTTCTGCTCATGTATGTTATCACAGTG | |
| GTAGGAAACCTTGGGATGATCATAATAATCAAGATTAACCCCAAATTTCACACTCCTATGT | |
| ACTTTTTCCTTAGTCACCTCTCTTTTGTTGATTTTTGTTACTGTTCCATTGTCACTCCCAAGC | |
| TGCTTGAGAACTTGGTAATGGCAGATAAAAGCATGTTCTACTTTAGCTGCATGATGCAGTA | |
| CTTCCTGTCCTGCACTGCTGTGGTGACAGAGTCTTTCTTGCTGGCAGTGATGGCCTATGAC | |
| CGCTTTGTGGCCATCTGCAATCCTCTGCTTTATACAGTGGCCATGTCACAGAGGCTCTGTG | |
| CCCTGCTGGTGGGTGGGTCATATCTCTGGGGCATGTTTGGCCCCTTGGTACTCCTTTGTTAT | |
| GCTCTCCGGTTAAAGTTCTCTGGACCTAATGTAATCAACCACTTCTTTTGTGAGTATACTGC | |
| TCTCATCTCTGTGTCTGGCTGTGATATACTCATCCCCCACCTGCTGCTTTTCAGCTTCGCCA | |
| CCTTCAATGAGATGTGTACACTACTGATCATCCTCACTTCCTATGTTTTCATTTTTGTGACT | |
| GTACTAAAAATCCGTTCTGTTAGTGGGCGCCACAAAGCCTTCTCCACCTGGGCCTCCCACC | |
| TGACTGCTATCACCATCTTCCATGGGACCATCCTTTTCCTTTACTGTGTACCCAACTCCAAA | |
| AACTCTCGGCAAACAGTCAAAGTGGCCTCTGTATTTTACACAGTTGTCAACCCCATGCTGA | |
| ACCCTCCGATCTACAGCCTAAGGAATAAAGACGTGAAGGATGCTTTCTGGAAGTTAATACA | |
| TACACAAGTTCCATTTCACTGA | |
| AOLFR3 sequences: | |
| MLLTDRNTSGTTFTLLGFSDYPELQVPLFLVFLAIYNVTVLGNIGLIVIIKINPKLHTPMYFFLSQ | (SEQ ID NO: 5) |
| LSFVDFCYSSIIAPKMLVNLVVKDRTISFLGCVVQFFFFCTFVVTESFLLAVMAYDRFVAICNPL | |
| LYTVDMSQKLCVLLVVGSYAWGVSCSLELTCSALKLCFHGFNTINHFFCEFSSLLSLSCSDTYI | |
| NQWLLFFLATFNEISTLLIVLTSYAFIVVTILKMRSVSGRRKAFSTCASHLTAITIFHGTILFLYCV | |
| PNSKNSRHTVKVASVFYTVVIPMLNPLIYSLRNKDVKDTVTEILDTKVFSY | |
| ATGCTGCTGACAGATAGAAATACAAGTGGGACCACGTTCACCCTCTTGGGCTTCTCAGATT | (SEQ ID NO: 6) |
| ACCCAGAACTGCAAGTCCCACTCTTCCTGGTTTTTCTGGCCATCTACAATGTCACTGTGCTA | |
| GGGAATATTGGGTTGATTGTGATCATCAAAATCAACGCCAAACTGGATACCCCCATGTACT | |
| TTTTCCTCAGCCAACTCTCCTTTGTGGATTTCTGCTATTCCTCCATCATTGCTCCCAAGATG | |
| TTGGTGAACCTTGTTGTCAAAGACAGAACCATTTCATTTTTAGGATGCGTAGTACAATTCT | |
| TTTTCTTCTGTACCTTTGTGGTCACTGAATCCTTTTTATTAGCTGTGATGGCCTATGACCGC | |
| TTCGTGGCCATTTGCAACCCTCTGCTCTACACAGTTGACATGTCCCAGAAACTCTGCGTGC | |
| TGCTGGTTGTGGGATCCTATGCCTGGGGAGTCTCATGTTCCTTGGAACTGACGTGCTCTGC | |
| TTTAAAGTTATGTTTTCATGGTTTCAACACAATCAATCACTTCTTCTGTGAGTTCTCCTCAC | |
| TACTCTCCCTTTCTTGCTCTGATACTTACATCAACCAGTGGCTGCTATTCTTTCTTGCCACC | |
| TTTAATGAAATCAGCACACTACTCATCGTTCTCACATCTTATGCGTTCATTGTTGTAACCAT | |
| CCTCAAGATGCGTTCAGTCAGTGGGCGCCGCAAAGCCTTCTCCACCTGTGCCTCCCACCTG | |
| ACTGCCATCACCATCTTCCATGGCACCATCCTCTTCCTTTACTGTGTGCCCAACTCCAAAAA | |
| CTCCAGGCACACAGTCAAAGTGGCCTCTGTGTTTTACACCGTGGTGATCCCCATGTTGAAT | |
| CCCCTGATCTACAGTCTGAGAAATAAAGATGTCAAGGATACAGTCACCGAGATACTGGAC | |
| ACCAAAGTCTTCTCTTACTGA | |
| AOLFR4 sequences: | |
| MENQNNVTEFILLGLTENLELWKIFSAVFLVMYVATVLENLLIVVTIITSQSLRSPMYFFLTFLS | (SEQ ID NO: 7) |
| LLDVMFSSVVAPKVIVDTLSKSTTISLKGCLTQLFVEHFFGGVGIILLTVMAYDRYVAICKPLHY | |
| TIIMSPRVCCLMVGGAWVGGFMHAMIQLLFMYQIPFCGPNIIDHFICDLFQLLTLACTDTHILGL | |
| LVTLNSGMMCVAIFLILIASYTVILCSLKSYSSKGRHKALSTCSSHLTVVVLFFVPCIFLYMRPV | |
| VTHPIDKAMAVSDSIITPMLNPLIYTLRNAEVKSAMKKLWMKWEALAGK | |
| ATGGAAAATCAAAACAATGTGACTGAATTCATTCTTCTGGGTCTCACAGAGAACCTGGAGC | (SEQ ID NO: 8) |
| TGTGGAAAATATTTTCTGCTGTGTTTCTTGTCATGTATGTAGCCACAGTGCTGGAAAATCT | |
| ACTTATTGTGGTAACTATTATCACAAGTCAGAGTCTGAGGTCACCTATGTATTTTTTTCTTA | |
| CCTTCTTGTCCCTTTTGGATGTCATGTTCTCATCTGTCGTTGCCCCCAAGGTGATTGTAGAC | |
| ACCCTCTCCAAGAGCACTACCATCTCTCTCAAAGGCTGCCTCACCCAGCTGTTTGTGGAGC | |
| ATTTCTTTGGTGGTGTGGGGATCATCGTCCTCACTGTGATGGCCTATGACCGCTACGTGGC | |
| CATGTGTAAGCCCCTGCACTACACGATCATCATGAGTCCACGGGTGTGCTGCCTAATGGTA | |
| GGAGGGGCTTGGGTGGGGGGATTTATGCACGCAATGATACAACTTCTCTTCATGTATCAAA | |
| TACCCTTCTGTGGTCCTAATATCATAGATCACTTTATATGTGATTTGTTTCAGTTGTTGACA | |
| CTTGCCTGCACGGACACCCACATCCTGGGCCTCTTAGTTACCCTCAACAGTGGGATGATGT | |
| GTGTGGCCATCTTTCTTATCTTAATTGCGTCCTACACGGTCATCCTATGCTCCCTGAAGTCT | |
| TACAGCTCTAAAGGGCGGCACAAAGCCCTCTCTACCTGCAGCTCCCACCTCACGGTGGTTG | |
| TATTGTTCTTTGTCCCCTGTATTTTCTTGTACATGAGGCCTGTGGTCACTCACCCCATAGAC | |
| AAGGCAATGGCTGTGTCAGACTCAATCATCACACCCATGTTAAATCCCTTGATGTATACAC | |
| TGAGGAATGCAGAGGTGAAAAGTGCCATGAAGAAACTCTGGATGAAATGGGAGGCTTTGG | |
| CTGGGAAATAA | |
| AOLFR5 sequences: | |
| MGKENCTTVAEFILLGLSDVPELRVCLFLLFLLIYGVTLLANLGMIALIQVSSRLHTPMYFFLSH | (SEQ ID NO: 9) |
| LSSVDFCYSSIIVPKMLANIFNXDKAISFLGCMVQFYLFCTCVVTEVFLLAVMAYDRFVAICNPL | |
| LYTVTMSWKVRVELASCCYFCGTVCSLIHLCLALRIPFYRSNVTNHFFCDLPPVLSLACSDITVN | |
| ETLLFLVATLNESVTIMIILTSYLLILTTILKMGSAEGRHKAFSTCASHLTAITVFHGTVLSIYCRP | |
| SSGNSGDADKVATVFYTVVIPMLNSVIYSLRNKDVKEALRKVMGSKIHS | |
| ATGGGCAAGGAAAACTGCACCACTGTGGCTGAGTTCATTCTCCTTGGACTATCAGATGTCC | (SEQ ID NO: 10) |
| CTGAGTTGAGAGTCTGGCTCTTCCTGCTGTTCCTTCTCATCTATGGAGTCACGTTGTTAGCC | |
| AACCTGGGCATGATTGCAGTGATTCAGGTCAGCTCTCGGCTCCACACCCCGATGTACTTTT | |
| TCCTCAGCCACTTGTCCTCTGTAGATTTCTGCTACTCCTCAATAATTGTGCCAAAAATGTTG | |
| GCTAATATCTTTAACAAGGACAAAGCCATCTCCTTCCTAGGGTGCATGGTGCAATTCTACT | |
| TGTTTTGCACTTGTGTGGTCACTGAGGTCTTCCTGCTGGCCGTGATGGCCTATGACCGGTTT | |
| GTGGCCATCTGTAACCGTTTGCTATACACAGTCACCATGTCTTGGAAGGTGCGTGTGGAGC | |
| TGGCTTCTTGGTGCTACTTCTGTGGGACGGTGTGTTCTCTGATTCATTTGTGCTTAGCTCTT | |
| AGGATCCCCTTCTATAGATCTAATGTGATTAACCACTTTTTCTGTGATCTACCTCCTGTGTT | |
| AAGTCTTGCTTGCTCTGATATCACTGTGAATGAGACACTGCTGTTCCTGGTGGCCACTTTG | |
| AATGAGAGTGTTACCATCATGATCATCCTCACCTCCTACCTGGTAATTCTCACCACCATCCT | |
| GAAGATGGGCTGTGCAGAGGGCAGGCACAAAGCCTTCTCCACCTGTGCTTCCCACCTCACA | |
| GCTATCACTGTCTTCCATGGAACAGTCCTTTCCATTTATTGCAGGCCCAGTTCAGGCAATA | |
| GTGGAGATGCTGACAAAGTGGCCACCGTGTTCTACACAGTCGTGATTCCTATGCTGAACTC | |
| TGTGATCTACAGCCTGAGAAATAAAGATGTGAAAGAAGCTCTCAGAAAAGTGATGGGCTC | |
| CAAAATTCACTCCTAG | |
| AOLFR6 sequences: | |
| MMASERNQSSTPTFILLGFSEYPEIQVPLFLVFLFVYTVTVVGNLGMIIIIRLNSKLHTIMYFFLS | (SEQ ID NO: 11) |
| HLSLTDFCFSTVVTPKLLENLVVEYRTISFSGCIMQFCFACIFGVTETFMLAAMAYDRFVAVCK | |
| PLLYTTIMSQKLCALLVAGSYTWGIVCSLILTYFLLDLSFCESTFTNNFICDHSVIVSASYSDPYIS | |
| QRLCFIIAIFNEVSSLIIILTSYMLIFTTIMKMRSASGRQKTFSTCASHLTAITIFHGTILFYCVPNP | |
| KTSSLIVTVASVFYTVAIPMLNPLIYSLRNKDINNMFEKLVVTKLIYH | |
| ATGATGGCATCTGAAAGAAATCAAAGCAGCACACCCACTTTTATTCTCTTGGGTTTTTCAG | (SEQ ID NO: 12) |
| AATACCCAGAAATCCAGGTTCCACTCTTTCTGGTTTTCTTGTTCGTCTACACAGTGACTGTA | |
| GTGGGGAACTTGGGCATGATAATAATCATCAGACTCAATTCAAAACTCCATACAATCATGT | |
| ACTTTTTCCTTAGTCACTTGTCCTTGACAGACTTCTGTTTTTCCACTGTAGTTACACCTAAA | |
| CTGTTGGAGAACTTGGTTGTGGAATACAGAACCATCTCTTTCTCTGGTTGCATCATGCAAT | |
| TTTGTTTTGCTTGCATTTTTGGAGTGACAGAAACTTTCATGTTAGCAGCGATGGCTTATGAC | |
| CGTTTTGTGGCAGTTTGTAAACCCTTGCTGTATACCACTATFfATGTCTCAGAAGCTCTGTGC | |
| TCTTCTGGTGGCTGGGTGCTATACATGGGGGATAGTGTGCTCCCTGATACTCACATATTTT | |
| CTTCTTGACTTATCGTTTTGTGAATCTACCTTCATAAATAATTTTATCTGTGACCACTCTGT | |
| AATTGTTTCTGCCTCCTACTCAGACCCCTATATCAGCCAGAGGCTATGCTTTATTATTGCCA | |
| TATTCAATGAGGTGAGCAGCCTAATTATCATTCTGACATCATATATGCTTATTTTCACTACG | |
| ATTATGAAGATGCGATCTGCAAGTGGGCGCCAGAAAAGTTTCTCCACCTGTGCCTCCCACC | |
| TGACAGCCATCACTATCTTCCATGGAACTATCCTTTTCCTTTACTGTGTTCCTAATCCTAAA | |
| ACTTCTAGCCTCATAGTTACAGTGGCTTCTGTGTTTTACACAGTGGCGATFFCCAATGCTGA | |
| ACCCATTGATCTACAGCCTTAGGAACAAAGATATCAATAACATGTTTGAAAAATTAGTTGT | |
| CACCAAATTGATTTACCACTGA | |
| AOLFR7 sequences: | |
| MSYFYRLKLMKEAVLVKLPFTSLPLLLQTLSRKSRDMEIKNYSSSTSGFILLGLSSNPQLQKPLF | (SEQ ID NO: 13) |
| AIFLIMYLLAAVGNVLIIPAIYSDPRLHTPMYFFLSNLSFMDICFTTVIVPKMLVNFLSETKVISY | |
| VGCLAQMYFFMAFGNTDSYLLASMAIDRLVAICNPLHYDVVMKPRHCLLMLLGSCSISHLHSL | |
| FRVLLMSRLSFCASHIIKHFFCDTQPVLKLSCSDTSSSQMVVMTETLAVIVTPFLCIIFSYLRIMV | |
| TVLRIPSAAGKWKAFSTCGSHLTAVALFYGSIIYVYFRPLSMYSVVRDRVATVMYTVVTPMLN | |
| PFIYSLRNKDMKRGLKKLQDRIYR | |
| ATGAGCTATTTTTACAGGCTTAAGCTTATGAAAGAAGCTGTCTTGGTCAAACTGCCCTTTA | (SEQ ID NO: 14) |
| CATCTCTCCCACTGCTTCTCCAAACCCTATCCAGGAAGTCCAGAGACATGGAGATAAAGAA | |
| CTACAGCAGCAGCACCTCAGGCTTCATCCTCCTGGGCCTCTCTTGCAACCCTCAGCTGCAG | |
| AAACCTCTCTTTGCCATCTTCCTCATCATGTACCTGCTCGCTGCGGTGGGGAATGTGCTCAT | |
| CATCCCGGCCATCTACTCTGACCCCAGGCTCCACACCCCTATGTACTTTTTTCTCAGCAACT | |
| TGTCTTTCATGGATATCTGCTTCACAACAGTCATAGTGCCTAAGATGCTGGTGAATTTTCTA | |
| TCAGAGACAAAGGTTATCTCCTATGTGGGCTGGCTGGCCCAGATGTACTTCTTTATGGCAT | |
| TTGGGAACACTGACAGCTACCTGCTGGGGTCTATGGCCATCGACCGGGTGGTGGCCATCTG | |
| CAACCCCTTACACTATGATGTGGTTATGAAACCACGGCATTGCCTGCTCATGCTATTGGGT | |
| TCTTGCAGCATCTCCCACCTACATTCCCTGTTCCGCGTGCTACTTATGTCTCGCTTGTCTTT | |
| CTGTGCCTCTCACATCATTAAGCACTTTTTCTGTGACACCCAGCCTGTGGTAAAGCTCTCCT | |
| GCTCTGACACATCCTCCAGCCAGATGGTGGTGATGACTGAGACCTTAGCTGTCATTGTGAC | |
| CCCCTTCCTGTGTATCATCYfCTCCTACCTGCGAATCATGGTCACTGTGCTCAGAATCCCCT | |
| CTGCAGCCGGGAAGTGGAAGGCCTTCTGTACCTGTGGCTCCCACCTCACTGCAGTAGCCCT | |
| TTTCTATGGGAGTATTATTTATGTCTATTTTAGGCCCCTGTCCATGTACTCAGTGGTTAGGG | |
| ACCGGGTAGCCACAGTTATGTACACAGTAGTGACACCCATGCTGAACCCTTTCATGTACAG | |
| CCTGAGGAACAAAGATATGAAGAGGGGTTTGAAGAAATTACAGGACAGAATTTAGCGGTA | |
| A | |
| AOLFR8 sequences: | |
| MATSNHSSGAEFILAGLTQRPELQLPLFLLFLGIYVVTVVGNLGMIFLIALSSQLYPPVYYFLSH | (SEQ ID NO: 15) |
| LSFIDLCYSSVITPKMLVNFVPEENIISFLECITQLYFFLIFVIAEGYLLTAMEYDRVVAICRPLLY | |
| NIVMSHRVCSIMMAVVYSLGFLWATVHTTRMSVLSFCRSHTVSHYFCDILPLLTLSCSSTHINEI | |
| LLFIIGGVNTLATTLAVLISYAFIFSSILGIHSTEGQSKAFGTCSSHLLAVGIFFGSITFMYFKPPSS | |
| TTMEKEKVSSVFYITIIPMLNPLIYSLRNKDVKNALKKMTRGRQSS | |
| ATGGCTACTTCAAACCATTCTTCAGGGGCTGAGTTTATCCTGGCAGGCTTGACACAACGCC | (SEQ ID NO: 16) |
| CAGAACTTCAACTGCCACTCTTCCTCCTGTTCCTTGGAATATATGTGGTCACAGTGGTGGG | |
| GAACCTGGGCATGATCTTCTTAATTGCTCTCAGTTCTCAACTTTACCCTCCAGTGTATTATT | |
| TTCTCAGTCATTTGTCTTTCATTGATCTCTGCTACTCCTCTGTCATTACCCCTAAGATGCTG | |
| GTGAACTTTGTTCCAGAGGAGAACATTATCTCCTTTCTGGAATGCATTACTCAACTTTATTT | |
| CTTCCTTATTTTTGTAATTGCAGAAGGCTACCTTCTGACAGCCATGGAATATGACCGTTAT | |
| GTTGCTATCTGTCGCCCACTGCTTTACAATATTGTCATGTCCCACAGGGTCTGTTCCATAAT | |
| GATGGCTGTGGTATACTCACTGGGTTTTCTGTGGGCCACAGTCCATACTACCCGCATGTCA | |
| GTGTTGTCATTCTGTAGGTCTCATACGGTCAGTCATTATTTTTGTGATATTCTCCCCTTATT | |
| GACTCTGTCTTGCTCCAGCACCCACATCAATGAGATTCTGCTGTTCATTATTGGAGGAGTT | |
| AATACCTTAGCAACTACACTGGCGGTCCTTATCTCTTATGCTTTCATTTTCTCTAGTATCCT | |
| TGGTATTCATTCCACTGAGGGGCAATCCAAAGCCTTTGGCACTTGTAGCTCCCATCTCTTG | |
| GCTGTGGGCATCTTTTTTGGGTCTATAACATTCATGTATTTCAAGCCCCCTTCCAGCACTAC | |
| TATGGAAAAAGAGAAGGTGTCTTCTGTGTTCTACATCACAATAATCCCCATGCTGAATCCT | |
| CTAATCTATAGCCTGAGGAACAAGGATGTGAAAAATGCACTGAAGAAGATGACTAGGGGA | |
| AGGCAGTCATCCTGA | |
| AOLFR9 sequences: | |
| MLARNNSLVTEFILAGLTDRPEFWQPFFFLFLVIYIVTMVGNLGLITLFGLNSHLHTPMYYFLFN | (SEQ ID NO: 17) |
| LSFIDLCYSSVFTPKALMNFVSKKNIISNVGCMTPIFFFLFFVISECYMLTSMAYDRYVAICNPL | |
| LYKVTMSHQVCSMLTFAAYIMGLAGATAHTGCMFRLTFCSANIINHYLCDILPLLQLSCTSTYV | |
| NEVVVLIVVGTNITVPSCTILISYVFIVTSILHIKSTQGRSKAFSTCSSHVIALSLFFGSAAFMYIKY | |
| SSGSMEQGKVFSVFYTNVVPMLNPLIYSLRNKDVKVALRKALIKIQRRNIF | |
| ATGCTGGCTAGAAACAACTCCTTAGTGACTGAATTTATTCTTGCTGGATTAACAGATCGTC | (SEQ ID NO: 18) |
| CAGAGTTCTGGCAACCCTTCTTTTTCCTGTTCCTAGTGATGTACATTGTCACCATGGTAGGC | |
| AACCTTGGCTTGATCACTCTTTTCGGTCTAAATTCTCACCTCCACACACCAATGTACTATTT | |
| CCTCTTCAATCTCTCCTTCATTGATCTCTGTTACTCCTCTGTTTTCACTCCCAAAATGCTAAT | |
| GAACTTTGTGTCAAAAAAGAATATTATCTCCAATGTTGGGTGCATGACTCGGCTGTTTTTC | |
| TTTCTCTTTTTCGTCATCTCTGAATGTTACATGTTGACCTCAATGGCATATGATCGCTATGT | |
| GGCCATCTGTAATCCATTGCTGTATAAGGTCACCATGTCCCATCAGGTCTGTTCTATGCTCA | |
| CTTTTGCTGCTTACATAATGGGATTGGCTGGAGCCACGGCCCACACCGGGTGCATGTTTAG | |
| ACTCACCTTCTGCAGTGCTAATATCATTAACCATTACTTGTGTGACATACTCCCCCTCCTCC | |
| AGCTTTCCTGCACCAGCACCTATGTCAACGAGGTGGTTGTTCTCATTGTTGTGGGTACTAA | |
| TATCACGGTACCCAGTTGTACCATCCTCATTTCTTATGTTTTCATTGTCACTAGCATTCTTC | |
| ATATCAAATGCACTCAAGGAAGATCAAAAGCCTTCAGTACTTGTAGCTCTCATGTCATTGC | |
| TCTGTCTCTGTTTTTTGGGTCAGCGGCATTCATGTATATTAAATATTCTTCTGGATCTATGG | |
| AGCAGGGAAAAGTTTTTTCTGTTTTCTACACTAATGTGGTGCCCATGCTCAATCCCCTCATC | |
| TACAGTTTGAGGAACAAGGATGTCAAAGTTGCACTGAGGAAAGCTCTGATTAAAATTCAG | |
| AGGAGAAATATATTCTAA | |
| AOLFR10 sequences: | |
| MLARNNSLVTEFILAGLTDRIPEFRQPLFFLFLVIYIVTMVGNLGLIILFGLNSHLHTPMYYFLFNL | (SEQ ID NO: 19) |
| SFIDLCYSSVFTPKMLMNFVSKKNIISYVGCMTQLFFFLFFVISECYILTSMAYDRYVAICNPLLY | |
| KVTMSHQVCSMLTFAAYIMGLAGATAHTGCMLRITFCSANIINHYLCDILPLLQLSCTSTYVN | |
| EVVVLIVVGINIMVPSCTILISYVFIVTSILHIKSTQGRSKAFSTCSSHVIALSLFFGSAAFMYIKYS | |
| SGSMEQGKVSSVFYTNVVPMLNPLIYSLRNKDVKVALRKALIKIQRRNIF | |
| ATGCTGGCTAGAAACAACTCCTTAGTGACTGAATTTATTCTTGCTGGATTAACAGATCGTC | (SEQ ID NO: 20) |
| CAGAGTTCCGGCAACCCCTCTTTTTCCTGTTTCTAGTGATCTACATTGTCACCATGGTAGGC | |
| AACCTTGGCTTGATCATTCTTTTCGGTCTAAATTCTCACCTCCACACACCAATGTACTATTT | |
| CCTCTTCAATCTCTCCTTCATTGATCTCTGTTACTCCTCTGTTTCACTCCCAAAATGCTAAT | |
| GAACTTTGTATCAAAAAAGAATATTATCTCCTATGTTGGGTGCATGACTCAGCTGTTTTTCT | |
| TTCTCTTTTTTGTCATCTCTGAATGCTAGATATTGACCTCAATGGCATATGATCGCTATGTG | |
| GCCATCTGTAATCCATTGCTGTATAAGGTCACCATGTCCCATCAGGTCTGTTCTATGCTCAC | |
| TTTTGCTGCTTACATAATGGGATTGGCTGGAGCCACGGCCCACACCGGGTGCATGCTTAGA | |
| CTCACCTTCTGCAGTGCTAATATCATCAACCATTACTTGTGTGACATACTCCCCCTCCTCCA | |
| GCTTTCCTGCACCAGCACCTATGTCAACGAGGTGGTTGTTCTCATTGTTGTGGGTATTAAT | |
| ATCATGGTACCCAGTTGTACCATCCTCATTTCTTATGTTTTCATTGTCACTAGCATTCTTCA | |
| TATCAAATCCACTCAAGGAAGATCAAAAGCCTTCAGTACTTGTAGCTCTCATGTCATTGCT | |
| CTGTCTCTGTTTTTTGGGTCAGCGGCATTCATGTATATTAAATATTCTTCTGGATCTATGGA | |
| GCAGGGAAAAGTTTCTTCTGTTTTCTACACTAATGTGGTGCCCATGCTCAATCCTCTCATCT | |
| ACAGTTTGAGGAACAAGGATGTCAAAGTTGCACTGAGGAAAGCTCTGATTAAAATTCAGA | |
| GAAGAAATATATTCTAA | |
| AOLFR11 sequences: | |
| MTLRNSSSVTEFILVGLSEQPELQLPLFLLFLGIYVFTVVGNLGLITLIGINPSLHTPMYFFLFNLS | (SEQ ID NO: 21) |
| FIDLCYSCVFTPKMLNDFVSESIISYVGCMTQLFFFCFFVNSECYVLVSMAYDRYVAICNPLLY | |
| MVTMSPRVCFLLMFGSYVVGFAGAMAHTGSMLRLTFCDSNVIDHYLCDVLPLLQLSCTSTHV | |
| SELVFFIVVGVITMLSSISIVISYALILSNILCIPSAEGRSKAFSTWGSHIIAVALFFGSGTFTYLTTS | |
| FPGSMNHGRYASVFYTNVVPMLNPSIYSLRNKDDKLALGKTLKRVLF | |
| ATGACTCTGAGAACAGCTCCTCAGTGACTGAGTTTATCCTTGTGGGATTATCAGAACAGC | (SEQ ID NO: 22) |
| CAGAGCTCCAGCTCCCTGTTTTCCTTCTATTCTTAGGGATCTATGTGTTCACTGTGGTGGGC | |
| AACTTGGGCTTGATCACCTTAATTGGGATAAATCCTAGCCTTCACACCCCCATGTACTTTTT | |
| CCTCTTCAACTTGTCCTTTATAGATCTCTGTTATTCCTGTGTGTTTACCCCCAAAATGCTGA | |
| ATGACTTTGTTTCAGAAAGTATCATCTCTTATGTGGGATGTATGACTCAGCTATTTTTCTTC | |
| TGTTTCTTTGTCAATTCTGAGTGCTATGTGTTGGTATCAATGGCCTATGATCGCTATGTGGC | |
| CATCTGCAACCCCCTGCTCTACATGGTCACCATGTCCCCAAGGGTCTGCTTTCTGCTGATGT | |
| TTGGTTCCTATGTGGTAGGGTTTGCTGGGGCCATGGCCCACACTGGAAGCATGCTGCGACT | |
| GACCTTCTGTGATTCCAACGTCATTGACCATTATCTGTGTGACGTTCTCCCCCTCTTGCAGC | |
| TCTCCTGCACCAGCACCCATGTCAGTGAGCTGGTATTTTTCATTGTTGTTGGAGTAATCACC | |
| ATGCTATCCAGCATAAGCATCGTCATCTCTTACGCTTTGATACTCTCCAACATCCTCTGTAT | |
| TCCTTCTGCAGAGGGCAGATCCAAAGCCTTTAGCACATGGGGCTCCCACATAATTGCTGTT | |
| GCTCTGTTTTTTGGGTCAGGGACATTCACCTACTTAACAACATCTTTTCCTGGCTCTATGAA | |
| CCATGGCAGATTTGCCTCAGTCTTTTACACCAATGTGGTTCCCATGCTTAACCCTTCGATCT | |
| ACAGTTTGAGGAATAAGGATGATAAACTTGCCCTGGGCAAAACCCTGAAGAGAGTGCTCT | |
| TCTAA | |
| AOLFR12 sequences: | |
| MERNHNPDNCNVLNFFFADKKNKRRNFGQIVSDVGRICYSVSLSLGEPTTMGRNNLTRPSEFIL | (SEQ ID NO: 23) |
| LGLSSRPEDQKPLFAVFLPIYLITVIGNLLIILAIRSDTRLQTPMYFFLSILSFVDICYVTVIIPKMLV | |
| NFLSETKTISYGECLTQMYFFLAFGNTDSYLLAAMAIDRYVAICNPFHYITIMSHRCCVLLLVLS | |
| FCIPHFHSLLHILLTNQLIFCASNVIHHFFCDDQPVLKLSCSSHFVKEITVMTEGLAVIMTPFSCIII | |
| SYLRILITVLKIPSAAGKRKAFSTCGSHLTVVTLFYGSISYVYFQPLSNYTVKDQIATIIYTVLTP | |
| MLNPFIYSLRNKDMKQGLAKLMHRMKCQ | |
| ATGGAAAGAAACCACAATCCAGATAATTGTAATGTTTTAAATTTTTTCTTTGCTGATAAGA | (SEQ ID NO: 24) |
| AGAATAAAAGGAGAAATTTTGGACAGATTGTATCAGATGTTGGAAGAATCTGTTACAGTG | |
| TTAGTTTATCTTTAGGTGAACCCACAACTATGGGAAGAAATAACCTAACAAGACCCTCTGA | |
| ATTCATCCTCCTTGGACTCTCCTCTCGACCTGAGGATCAGAAGCCGCTCTTTGCTGTGTTCC | |
| TCCCCATCTACCTTATCACAGTGATAGGAAACCTGCTTATCATCCTGGCCATCCGCTCAGA | |
| CACTCGTCTCCAGACGCCCATGTACTTCTTTCTAAGCATCCTGTCTTTTGTTGACATTTGCT | |
| ATGTGACAGTCATTATCCCTAAGATGCTGGTGAACTTCTTATGAGAGACAAAGACCATCTC | |
| TTACGGTGAGTGTCTGACCCAGATGTACTTTTTCTTAGCCTTTGGAAACACAGACAGTTAC | |
| CTGCTAGCAGCCATGGGCATTGACCGCTATGTGGCCATATGTAATCCCTTCCACTACATCA | |
| CCATTATGAGTCACAGATGCTGTGTCCTGCTTCTGGTTCTCTCCTTCTGCATTCCACATTTT | |
| CACTCCCTCCTGCACATTCTTCTGACTAATCAGCTCATCTTCTGTGCCTCCAATGTCATCCA | |
| TCACTTTTTCTGCGATGATCAACCAGTGCTAAAATTGTCCTGTTCCTCCCATTTTGTCAAAG | |
| AAATCACAGTAATGACAGAAGGCTTGGCTGTCATAATGAGCCCGTTTTCATGCATCATCAT | |
| CTCTTATTTAAGAATCCTCATCACTGTTCTGAAGATTCCTTCAGCTGCTGGAAAGCGTAAA | |
| GCATTTTCTACCTGTGGCTCTCATCTCACAGTGGTGACCCTGTTTTATGGAAGCATTAGCTA | |
| TGTCTATTTTCAGCCCCTGTCCAACTATACTGTCAAGGATCAAATAGCAACAATTATCTAC | |
| ACCGTACTGACTCCTATGCTAAATCCATTTATCTATAGTCTGAGGAACAAAGACATGAAGC | |
| AGGGTTTGGCAAAGTTGATGCACAGGATGAAATGTCAGTAA | |
| AOLFR13 sequences: | |
| MDQKNGSSFTGFILLGFSDRPQLELVLFVVLLIFYIFTLLGNKTIIVLSHLDPHLHNPMYFFFSNL | (SEQ ID NO: 25) |
| SFLDLCYTTGIVPQLLVNLRGADKSISYGGCVVQLYISLGLGSTECVLLGVMAFDRYAAVCRPL | |
| HYTVVMHPCLYVLMASTSWVIGFANSLLQTVLILLLTLCGRNKLEHFLCEVPPLLKLACVDTT | |
| MNESELFFVSVIILLVPVALIIFSYSQIVRAVVRIKSATGQRKVFGTCGSHLTVVSLFYGTAIYAY | |
| LQPGNNYSQDQGKXISLFYTIITPMINPLIYTLRNKDVKGALKKVLWKNYDSR | |
| ATGGATCAGAAAAATGGAAGTTCTTTCACTGGATTTATCCTACTGGGTTTCTCTGACAGGC | (SEQ ID NO: 26) |
| CTCAGCTGGAGCTAGTCCTCTTTGTGGTTCTTTTGATCTTCTATATCTTCACTTTGCTGGGG | |
| AACAAAACCATCATTGTATTATCTCACTTGGACCCACATCTTCACAATCCTATGTATTTTTT | |
| CTTCTCCAACCTAAGCTTTTTGGATCTGTGTTACACAACCGGCATTGTTCCACAGCTCCTGG | |
| TTAATCTCAGGGGAGCAGACAAATCAATCTCCTATGGTGGTTGTGTAGTTCAGCTGTACAT | |
| CTCTCTAGGCTTGGGATCTACAGAATGCGTTCTCTTAGGAGTGATGGCATTTGACCGCTAT | |
| GCAGCTGTTTGCAGGCCCCTCCACTACACAGTAGTCATGCACCCTTGTCTGTATGTGCTGA | |
| TGGCTTCTACTTCATGGGTCATTGGTTTTGCCAACTCCCTATTGCAGACGGTGCTCATCTTG | |
| CTTTTAACACTTTGTGGAAGAAATAAATTAGAACACTTTCTTTGTGAGGTTCCTCCATTGCT | |
| CAAGCTTGCCTGTGTTGACACTACTATGAATGAATCTGAACTCTTCTTTGTCAGTGTCATTA | |
| TTCTTCTTGTACCTGTTGCATTAATCATATTCTCCTATAGTCAGATTGTCAGGGCAGTCGTG | |
| AGGATAAAGTCAGCAACAGGGCAGAGAAAAGTGTTTGGGACATGTGGCTCCCACCTCACA | |
| GTGGTTTCCCTGTTCTACGGCACAGCTATCTATGCTtACCTCCAGCCCGGCAACAACTACTC | |
| TCAGGATCAGGGCAAGKTCATCTCTCTCTTCTACACCATCATTACACCCATGATCAACCCC | |
| CTCATATATACACTGAGGAACAAGGATGTGAAAGGAGCACTTAAGAAGGTGCTCTGGAAG | |
| AACTACGACTCCAGATGA | |
| AOLFR14 sequences: | |
| MALPLLLSPSCFASSQSLSSRMNSENLTRAAVAPAEFVLLGITNRWDLRVALFLTCLPVYLVSL | (SEQ ID NO: 27) |
| LGNMGMALLIRMDARLHTPMYFFLANLSLLDACYSSAIGPKMLVDLLLPRATIPYTACALQMF | |
| VFAGLADTECCLLAAMAYDRYVAIRNPLLYTTAMSQRLCLALLGASGLGGAVSAFVHTTLTF | |
| RLSFCRSRKINSFFCDIPPLLAISCSDTSLNELLLFAICGFIQTATVLAITVSYGFIAGAVIHMRSVE | |
| GSRRAASTGGSHLTAVAMMYGTLIFMYLRPSSSYALDTDKMASVFYTLVIPSLNPLIYSLRNKE | |
| VKEALRQTWSRFHCPGQGSQ | |
| ATGGCCTTGCCATTGCTCTTATCTCCCTCCTGCTTTGCCTCTTCTCAGTCTCTGTCCAGTAG | (SEQ ID NO: 28) |
| GATGAACTCAGAGAACCTCACCCGGGCCGCGGTTGCCCCTGCTGAAATTCGTCCTCCTGGGC | |
| ATCACAAATCGCTGGGACCTGCGTGTGGCCCTCTTGGTGACCTGCCTGCCTGTCTACGTGG | |
| TGAGCCTGCTGGGAAACATGGGCATGGCGCTGCTGATCCGCATGGATGCCCGGCTCCACA | |
| CACCTATGTACTTCTTCCTGGCCAACCTCTCCCTGCTGGATGCCTGCTATTCCTCCGCCATC | |
| GGCCCCAAGATGCTAGTGGACCTGGTGCTGCCCCGAGCCACCATCCCTTACACAGCCTGTG | |
| CCCTCCAGATGTTTGTCTTTGCAGGTCTGGCTGATACTGAGTGTTGCTTGCTGGCAGCCAT | |
| GGCCTATGACCGCTACGTGGCCATCAGAAACCCACTTCTCTATACAACAGCTATGTCGCAG | |
| CGTCTATGCCTGGCCTTGCTGGGAGCATCAGGCCTGGGTGGGGCAGTGAGTGCCTTTGTTC | |
| ACACAACCCTCACCTTCCGCCTGAGCTTCTGCCGCTCCCGGAAGATCAATAGCTTCTTCTG | |
| CGATATCCCTCCAGTGCTGGCCATCTCGTGCAGTGACACCAGTCTCAATGAACTCCTTCTCT | |
| TCGCCATCTGTGGCTTCATCCAGACAGCCACGGTGTTAGCTATCACGGTGTCTTATGGCTT | |
| CATCGCTGGGGCTGTGATCCACATGCGCTCGGTCGAGGGCAGTCGGCGAGCAGCCTCCAC | |
| CGGTGGTTCCCACCTCACAGCCGTGGCCATGATGTACGGGACACTCATTTTCATGTACCTG | |
| CGCCCCAGCTCCAGCTATGCCCTGGACACTGACAAGATGGCCTCTGTGTTCTATACCCTGG | |
| TCATCCCGTCTCTCAACCCACTCATCTACAGCCTCCGCAATAAGGAGGTCAAGGAGGCCCT | |
| CAGGCAGACCTGGAGCCGATTCCACTGTCCAGGGCAGGGGTCCCAGTGA | |
| AOLFR15 sequences: | |
| MRENNQSSTLEFILLGVTGQQEQEDFFYILFLFIYPITLIGNLLIVLAICSDVRLHNPMYFLLANLS | (SEQ ID NO: 29) |
| LVDIFFSSVTIPKMLANHLLGSKSISFGGCLTQMYFMIALGNTDSYILAAMAYDRAVAISPLH | |
| YTTIMSPRSCIWLIAGSWVIGNANALPHTLLTASLSFCGNQEVANFYCDITPLLKLSCSDIHFHV | |
| KMMYLGVGIFSVPLLCIIVSYIRVFSTVFQVPSTKGVLKAFSTCGSHLTVVSLYYGTVMGTYFR | |
| PLTNYSLKDAVITVMYTAVTPMLNPFIYSLRNRDMKAALRKLFNKRISS | |
| ATGAGGGAAAATAACCAGTCCTCTACACTGGAATTCATCCTCCTGGGAGTTACTGGTCAGC | (SEQ ID NO: 30) |
| AGGAACAGGAAGATTTCTTCTACATCCTCTTCCTGTTCATTTACCCCATCACATTGATTGGA | |
| AACCTGCTCATTGTCCTAGCCATTTGCTCTGATGTTCGCCTTCACAACCCCATGTATTTTCT | |
| CCTTGCCAACCTCTCCTTGGTTGACATCTTCTTCTCATCGGTAACCATCCCTAAGATGCTGG | |
| CCAACCATCTCTTGGGCAGCAAATCCATCTCTTTTGGGGGATGCCTAACGCAGATGTATTT | |
| CATGATAGCCTTGGGTAACACAGACAGCTATATTTTGGCTGCAATGGCATATGATCGAGCT | |
| GTGGCCATCAGCCACCCAGTTCAGTACACAACAATTATGAGTCCACGGTCTTGTATCTGGC | |
| TTATTGCTGGGTCTTGGGTGATTGGAAATGCCAATGCCCTCCCCCACACTCTGCTCACAGC | |
| TAGTCTGTCCTTCTGTGGCAACCAGGAAGTGGCCAACTTCTACTGTGACATTACCCCCTTG | |
| CTGAAGTTATCCTGTTCTGACATCCACTTTCATGTGAAGATGATGTACCTAGGGGTTGGCA | |
| TTTTCTCTGTGCCATTACTATGCATCATTGTCTCCTATATTCGAGTCTTCTCCACAGTCTTCC | |
| AGGTTCCTTCCACGAAGGGCGTGCTCAAGGCCTTCTCCACCTGTGGTTCCCACCTCACGGT | |
| TGTCTCTTTGTATTATGGTACAGTCATGGGCACGTATTTCCGCCCTTTGACCAATTATAGCC | |
| TAAAAGACGCAGTGATCAGTGTAATGTACACGGCAGTGACCCCAATGTTAAATCCTTTCAT | |
| CTACAGTCTGAGAAATCGGGACATGAAGGCTGCCCTGCGGAAACTCTTCAACAAGAGAAT | |
| CTGCTCGTAA | |
| AOLFR16 sequences: | |
| MRRNCTLVTEFILLGLTSRRELQILLFTLFLAIYMVTVAGNLGMIVLIQANAWLHMPMYFFLSH | (SEQ ID NO: 31) |
| LSFVDLCFSSNVTPKMLEIFLSEKKSISYPACLVQCYLFIALVHVEIYILAVMAFDRYMAICNPLL | |
| YGSRMSKSVCSFLITVPYVYGALTGLMETMWTYNLAFCGPNEINHFYCADPPLIKLACSDTYN | |
| KELSMFIVAGWNLSFSLFIICISYLYIFPAILKIRSTEGRQKAFSTCGSHLTAVTIFYATLFFMYLR | |
| PPSKESVEQGKMVAVFYTTVIPMLNLIIYSLRNKNVKEALIKELSMKAYFS | |
| ATGAGAAGAAACTGCACGTTGGTGACTGAGTTCATTCTCCTGGGACTGACCAGTCGCCGG | |
| GAATTACAAATTCTCCTCTTCACGCTGTTTCTGGCCATTTACATGGTCACGGTGGCAGGGA | (SEQ ID NO: 32) |
| ACCTTGGCATGATTGTCCTCATCCAGGCCAACGCCTGGCTCCACATGCCCATGTACTTTTTC | |
| CTGAGCCACTTATCCTTCGTGGATCTGTGCTTCTCTTCCAATGTGACTCCAAAGATGCTGG | |
| AGATTTTCCTTTCAGAGAAGAAAAGGATTTCCTATCCTGCCTGTCTTGTGCAGTGTTACCTT | |
| TTTATCGCCTTGGTCCATGTTGAGATCTACATCCTGGGTGTGATGGCCTTTGACGGGTACAT | |
| GGCCATCTGCAACCCTCTGCTTTATGGCAGCAGAATGTCCAAGAGTGTGTGCTCCTTCCTC | |
| ATCAGGGTGCCTTATGTGTATGGAGCGGTCACTGGCCTGATGGAGACCATGTGGACCTACA | |
| ACCTAGCCTTCTGTGGCCCCAATGAAATTAATCACTTCTACTGTGCGGACCCACCACTGAT | |
| TAAGCTGGCTTGTTCTGACACCTACAACAAGGAGTTGTCAATGTTTATTGTGGCTGGCTGG | |
| AACCTTTCTTTTTCTCTCTTCATCATATGTATTTCCTACCTTTACATTTTCCCTGCTATTTTA | |
| AAGATTCGCTCTAGAGAGGGCAGGCAAAAAGCTTTTTCTACCTGTGGCTCCCATCTGACAG | |
| CTGTCACTATATTCTATGCAACCCTTTTCTTCATGTATCTCAGACCCCCCTCAAAGGAATCT | |
| GTTGAACAGGGTAAAATGGTAGCTGTATTTTATACCACAGTAATCCCTATGCTGAACCTTA | |
| TAATTTATAGCCTTAGAAATAAAAATGTAAAAGAAGCATTAATCAAAGAGCTGTCAATGA | |
| AGATATACTTTTCTTAA | |
| AOLFR17 sequences: | |
| MLNFTDVTEFILLGLTSRREWQVLFFIIFLVVYIITMVGNIGMMVLIKVSPQLNNPMYFFLSHLS | (SEQ ID NO: 33) |
| FVDVWFSSNVTPKMLENLFSDKKTITYAGCLVQCFFFIALVHVEIFILAAMAFDRYMAIGNPLL | |
| YGSKMSRVVCIRLITFPYIYGFLTSLAATLWTYGLYFCGKIEINHFYCADPPLIKMACAGTFVKE | |
| YTMIILAGINFTYSLTVIIISYLFILIAILRMRSAEGRQKAFSTCGSHLTAVIIFYGTLIFMYLRRPTE | |
| ESVEQGKMVAVFYTTVIPMLNPMIYSLRNKDVKKAMMKVISRSC | |
| ATGCTCAATTTCACCGATGTGACAGAGTTCATTCTTTTGGGGCTAACGAGCCGTCGAGAAT | (SEQ ID NO: 34) |
| GGCAAGTTCTCTTCTTCATCATCTTTCTTGTGGTCTACATCATCACCATGGTGGGCAATATC | |
| GGCATGATGGTGTTAATCAAGGTCAGTCCTCAGCTTAACAACCCCATGTACTTTTTCCTCA | |
| GTCACTTGTCATTTGTTGATGTGTGGTTTTCTTCCAATGTCACCCCTAAAATGTTGGAAAAC | |
| CTGTTTTCAGATAAAAAAACAATTACTTATGCTGGTTGTTTAGTACAGTGTTTCTTCTTCAT | |
| TGCTCTTGTCCATGTGGAAATTTTTATTCTTGCTGCGATGGCCTTTGATAGATACATGGCAA | |
| TTGGGAATCCTCTGCTTTATGGCAGTAAAATGTCAAGGGTTGTCTGTATTCGACTGATTAC | |
| TTTCCCTTACATTTATGGTTTTCTGACGAGTCTGGCAGCAACATTATGGACTTACGGCTTGT | |
| ACTTCTGTGGAAAAATTGAGATCAACCATTTCTACTGTGCAGATCCACCTCTCATCAAAAT | |
| GGCCTGTGCCGGGACCTTTGTAAAAGAATATACAATGATCATACTTGCCGGCATTAACTTC | |
| ACATATTCCCTGACTGTAATTATCATCTCTTACTTATTCATCCTCATTGCCATTCTGCGAAT | |
| GCGCTCAGCAGAAGGAAGGCAGAAGGCCTTTTCCACATGTGGGTCCCATCTGACAGCTGT | |
| CATTATATTCTATGGTACTCTGATCTTCATGTATCTCAGACGTCCCACAGAGGAGTCTGTG | |
| GAGCAGGGGAAGATGGTGGCTGTGTTCTATACCACAGTGATCCCCATGTTGAATCCCATGA | |
| TCTACAGTCTGAGGAACAAGGATGTGAAAAAGGCCATGATGAAAGTGATCAGCAGATCAT | |
| GTTAA | |
| AOLFR18 sequences: | |
| MSNTNGSAITEFILLGLTDCPELQSLLFVLFLVVYLVTLLGNLGMIMLMRIDSRLHTPMYFFLT | (SEQ ID NO: 35) |
| NLAFVDLCYTSNATPQMSTNIVSEKTISFAGCFTQCYIFIALLLTEFYMLAAMAYDRYVAIYDP | |
| LRYSVKTSRRVCICLATFPYVYGFSDGLFQAILTFRLTFCRSNVINHFYCADPPLIKLSCSDTYVK | |
| EHAMFISAGFNLSSSLTIVLVSYAFILAAILRIKSAEGRHKAFSTCGSHMMAVTLFYGTLFCMYI | |
| RPPTDKTVEESKIIAVFYTFVSPVLNPLIYSLRNKDVKQALKNVLR | |
| ATGTCCAACACAAATGGCAGTGCAATCACAGAATTCATTTTACTTGGGCTCACAGATTGCC | (SEQ ID NO: 36) |
| CGGAACTCCAGTCTGTGCTTTTTGTGCTGTTTCTGGTTGTTTACCTCGTCACCCTGCTAGGC | |
| AACCTGGGCATGATAATGTTAATGAGACTGGACTCTCGCCTTCACACGCCCATGTACTTCT | |
| TCCTCACTAACTTAGCCTTTGTGGATTTGTGCTATACATCAAATGCAACCCCGCAGATGTC | |
| GACTAATATCGTATCTGAGAAGACCATTTCCTTTGCTGGTTGCTTTACACAGTGCTACATTT | |
| TCATTGCCCTTCTACTCACTGAGTTTTACATGCTGGCAGCAATGGCCTATGACCGCTATGT | |
| GGCCATATATGACCCTCTGCGCTACAGTGTGAAAACGTCCAGGAGAGTTTGCATCTGCTTG | |
| GCCACATTTCCCTATGTCTATGGCTTCTCAGATGGACTCTTCCAGGCCATCCTGACCTTCCG | |
| CCTGACCTTCTGTAGATCCAATGTCATCAACCACTTCTACTGTGCTGACCCGCCGCTCATTA | |
| AGCTTTCTTGTTCTGATACTTATGTCAAAGAGCATGCCATGTTCATATCTGCTGGCTTCAAC | |
| CTCTCCAGCTCCCTCACCATCGTCTTGGTGTCCTATGCCTTCATTCTTGCTGCCATCCTCCG | |
| GATCAAATCAGCAGAGGGAAGGCACAAGGCATTCTCCACCTGTGGTTCCCATATGATGGC | |
| TGTCACCCTGTTTTATGGGACTCTCTTTTGCATGTATATAAGACCACCAACAGATAAGACT | |
| GTTGAGGAATCTAAAATAATAGCTGTCTTTTACACCTTTGTGAGTCCGGTACTTAATCCAT | |
| TGATCTACAGTCTGAGGAATAAAGATGTGAAGCAGGCCTTGAAGAATGTCCTGAGATGA | |
| AOLFR19 sequences: | |
| METKNYSSSTSGFILLGLSSNPKLQKPLFAIFLIMYLLTAVGNVLIILAIYSDPRLHTPMYFFLSNL | (SEQ ID NO: 37) |
| SFMDICFTTVIVPKMLVNFLSETKIISYVGCLIQMYFFMAFGNTDSYLLASMAIDRLVAICNPLH | |
| YDVVMKPWHCLLMLLGSCSISHLHSLFRVLLMSRISFCASHIIKHFFCDTQPVLKLSCSDTSSSQ | |
| MVVMTETLAVIVTPFLCTIFSYLQIIVTVLRIPSAAGKWKAFSTCGSHLTVVVLFYGSVIYVYFR | |
| PLSMYSVMKGRVATVMYTVVTPMLNPFIYSLRNKDMRGLKKLRHRIYS | |
| ATGGAGACAAAGAATTATAGCAGCAGCACCTCAGGCTTCATCCTCCTGGGCCTCTCTTCCA | |
| ACCCTAAGCTGCAGAAACCTCTCTTTGCCATCTTCCTCATCATGTACCTACTCACTGCGGTG | |
| GGGAATGTGCTCATCATCCTGGCCATCTACTCTGACCCCAGGCTCCACACCCCTATGTACT | |
| TTTTTCTCAGCAACTTGTCTTTCATGGATATCTGCTTCACAACAGTCATAGTGCCTAAGATG | |
| CTGGTGAATTTTCTATCAGAGACAAAGATTATCTCTTATGTGGGCTGCCTGATCCAGATGT | |
| ACTTCTTCATGGCATTTGGGAACACTGACAGCTACCTGCTGGCCTCTATGGCCATCGACCG | |
| GCTGGTGGCCATCTGCAACCCCTTACACTATGATGTGGTTATGAAACCATGGCATTGCCTA | (SEQ ID NO: 38) |
| CTCATGCTATTGGGTTCTTGCAGCATCTCCCACCTACATTCCCTGTTCCGCGTGCTACTTAT | |
| GTCTCGCTTGTCTTTCTGTGCCTCTCACATCATTAAGCACTTTTTCTGTGACACCCAGCCTG | |
| TGCTAAAGCTCTCCTGCTCTGACACATCCTCCAGCCAGATGGTGGTGATGACTGAGACCTT | |
| AGCTGTCATTGTGACCCCCTTCCTGTGTACCATCTTCTCCTACCTGCAAATCATCGTCACTG | |
| TGCTCAGAATCCCCTCTGCAGCCGGGAAGTGGAAGGCCTTCTCTACCTGTGGCTCCCACCT | |
| CACTGTAGTGGTCCTGTTCTATGGGAGTGTCATCTATGTCTATTTTAGGCCTCTGTCCATGT | |
| ACTCAGTGATGAAGGGCCGGGTAGCCACAGTTATGTACACAGTAGTGACACCCATGCTGA | |
| ACCCTTTCATCTACAGCCTGAGGAACAAAGATATGAAAAGGGGTTTGAAGAAATTAAGAC | |
| ACAGAATTTACTCATAG | |
| AOLFR20 sequences: | |
| MVEENHTMKNEFILTGFTDHPELKTLLFVVFFAIYLITVVGNISLVALIFTHCRLHTPMYIFLGN | (SEQ ID NO: 39) |
| LALVDSCCACAITPKMLENFFSEGKRISLYECAVQFYFLCTVETADCFLLAAVAYDRYVAICNP | |
| LQYHIMMSKKLCIQMTTGAFIAGNLHSMIHVGLVFRLVFCGLNHINHFYCDTLPLYRISCVDPF | |
| INELVLFIFSGSVQVFTIGSVLISYLYILLTIFRMKSKEGRAKAFSTCASHFSSVSLFYGSIFFLYIRP | |
| NLLEEGGNDIPAAILFTIVVPLLNPFIYSLRNKEVISVLRKILLKIKSQGSVNK | |
| ATGGTTGAAGAAAATCATACCATGAAAAATGAGTTTATCCTCACAGGATTTACAGATCACC | (SEQ ID NO: 40) |
| GTGAGCTGAAGACTCTGCTGTTTGTGGTGTTCTTTGCCATCTATCTGATCACCGTGGTGGG | |
| GAATATTAGTTTGGTGGCACTGATATTTACACACTGTCGGCTTCACACACCAATGTACATC | |
| TTTCTGGGAAATCTGGCTCTTGTGGATTCTTGCTGTGCCTGTGCTATTACCCCCAAAATGTT | |
| AGAGAACTTCTTTTCTGAGGGCAAAAGGATTTCCCTCTATGAATGTGCAGTACAGTTTTAT | |
| TTTCTTTGCACTGTGGAAACTGCAGACTGCTTTCTTCTGGCAGCAGTGGCCTATGACCGCT | |
| ATGTGGCCATCTGCAACCCACTGCAGTACCACATCATGATGTCCAAGAAACTCTGCATTCA | |
| GATGACCACAGGCGCCTTCATAGCTGGAAATCTGCATTCCATGATTCATGTAGGGCTTGTA | |
| TTTAGGTTAGTTTTCTGTGGATTGAATCACATCAACCACTTTTACTGTGATACTCTTCCCTT | |
| GTATAGACTCTCCTGTGTTGACCCTTTCATCAATGAACTGGTTCTATTCATCTTCTCAGGTT | |
| CAGTTCAAGTCTTTACCATAGGTAGTGTCTTAATATCTTATCTCTATATTCTTCTTACTATT | |
| TTCAGAATGAAATCCAAGGAGGGAAGGGCCAAAGCCTTTTCTACTTGTGCATCCCACTTTT | |
| CATCAGTTTCATTATTCTATGGATCTATTTTTTTCCTATACATTAGACCAAATTTGCTTGAA | |
| GAAGGAGGTAATGATATACCAGCTGCTATTTTATTTACAATAGTAGTTCCCTTACTAAATC | |
| CTTTCATTTATAGTCTGAGAAACAAGGAAGTAATAAGTGTCTTAAGAAAAATTCTGCTGAA | |
| AATAAAATCTCAAGGAAGTGTGAACAAATGA | |
| AOLFR21 sequences: | |
| MEPRKNVTDFVLLGFTQNPKEQKVLFVMFLLFYILTMVGNLLIVVTVTVSETLGSPMSFFLAGL | (SEQ ID NO: 41) |
| TFIDIIYSSSISPRLISDLFFGNNSISFQSFMAQLFIEHLFGGSEVFLLLVMAYDRYVAICKPLHYLV | |
| IMRQWVCVLLLVVSWVGGFLQSVFQLSIIYGLPFCGPNVIDHFFCDMYPLLKLACTDTHVIGLL | |
| VVANGGLSCTIAFLLLLISYGVILHSLKKLSQKGRQKAHSTCSSHITVVVFFFVPCIFMCARPAR | |
| TFSIDKSVSVFYTVITPMLNPLIYTLRNSEMTSAMKKL | |
| ATGGAGCCAAGGAAAAATGTGACTGACTTTGTCCTCTTGGGCTTCACACAGAATCCAAAG | (SEQ ID NO: 42) |
| GAGCAGAAAGTACTTTTTGTTATGTTCTTGCTCTTCTACATTTTGACCATGGTGGGCAACCT | |
| GCTCATTGTAGTGACCGTAACTGTCAGTGAGACCCTGGGCTCACCAATGTCCTTCTTTCTT | |
| GCTGGGTTAACATTTATAGATATCATTTATTCTTCATCCATTTCCCCCAGATTGATTTCAGA | |
| CTTGTTCTTTGGGAATAATTCCATATCCTTCCAATCTTTCATGGCCCAGGTCTTTATCGAGC | |
| ACCTTTTTGGTGGGTCAGAGGTCTTTCTCCTGTTGGTGATGGCCTATGACCGCTATGTGGC | |
| CATCTGTAAGCCCTTGCATTATTTGGTTATCATGAGACAATGGGTGTGTGTTTTGCTGCTG | |
| GTAGTGTCCTGGGTTGGAGGATTTCTGCAATCAGTATTTCAACTTAGCATTATTTATGGGC | |
| TCCCATTCTGTGGCCCCAATGTCATTGATCATTTTTTCTGTGACATGTATCCCTTATTGAAA | |
| CTGGCCTGCACTGACACCCATGTTATTGGCCTCTTAGTGGTGGCCAATGGAGGACTGTCTT | |
| GCACTATTGCGTTTCTGCTCTTACTCATCTCTTATGGTGTCATCCTGCACTCTCTAAAGAAA | |
| CTTAGTCAGAAAGGGAGGCAAAAAGCCCACTCAACCTGCAGTTCCCACATCACTGTGGTTG | |
| TCTTCTTCTTTGTTCCTTGTATTTTTATGTGTGCTAGACCTGCTAGGACCTTCTCCATTGAC | |
| AAATCAGTGAGTGTGTTTTATACAGTCATAACCCCAATGCTGAACCCCTTAATCTACACTC | |
| TGAGAAATTGTGAGATGACAAGTGCTATGAAGAAGCTTTAG | |
| AOLFR22 sequences: | |
| MRXXNNXTEFVLLGFSQDPGVXKALFVMFLLTYXXTVVGNLLIVVDIIASPXLGSPMYFFLAC | (SEQ ID NO: 43) |
| LSFIDAAYSTTISPKLIVGLFCDKKTISFQGCMGQLFIDHFFGGAEVFLLVVMACDRYVAICKPL | |
| HYLTIMNRQVCFLLLVXXMIGGFVHSAFQIVVYSLPFCGPXVIVHFSCDMHPLLELACTDTYFI | |
| GLTVVVNSGAICMVIFNLLLISYGVILSSLKTYSQEKRGKALSTCSSGSTVVVLFFVPCIFIYVRP | |
| VSNFPTDKFMTVFYTIITHMLSPLIYTLRNSEMRNAIEKLLGKKLTIFIIGGVSVLM | |
| ATGAGACANNNNAACAATATNACAGAATTTGTCCTCCTGGGCTTTTCTCAGGATCCTGGTG | (SEQ ID NO: 44) |
| TGNNNAAAGCATTATTTGTCATGTTTTTACTCACATACNNNNNNACAGTGGTGGGGAACCT | |
| GCTCATTGTNGTGGATATTATTGCCAGGCCTTNNTTGGGTTCCCCAATGTATTTCTTCCTTG | |
| CCTGCCTGTCATTTATAGATGCTGCATATTCCACTACCATTTCTCCCAAGTTAATTGTAGGC | |
| TTATTCTGTGATAAAAAGACTATTTCCTTCCAAGGTTGCATGGGCCAGCTATTTATAGACC | |
| ATTTCTTTGGTGGGGCTGAGGTCTTCCTTCTGGTGGTGATGGCCTGTGATCGCTATGTGGC | |
| CATCTGTAAGCCACTGCAGTATTTGACCATCATGAATCGACAGGTTTGCTTCCTTCTGTTGG | |
| TNNTNNCGATGATTGGAGGTTTTGTACATTCTGCGTTTCAAATTGTTGTGTACAGTCTCCCT | |
| TTCTGTGGTCCCNATGTCATTGTTCATTTGAGTTGTGACATGCACCCATTACTGGAACTGGC | |
| ATGCACTGACACCTACTTTATAGGCCTCACTGTTGTTGTCAATAGTGGAGCAATCTGTATG | |
| GTCATTTTCAACCTTCTGTTAATCTCCTATGGAGTCATCCTAAGCTCCCTTAAAACTTACAG | |
| TCAGGAAAAGAGGGGTAAAGCCTTGTCTACCTGCAGCTCCGGCAGTACCGTTGTTGTCCTC | |
| TTTTTTGTACCCTGTATTTTCATATATGTTAGACCTGTTTCAAACTTTCCTACTGATAAGTT | |
| CATGACTGTGTTTTATACCATTATCACACACATGCTGAGTCCTTTAATATATACGTTGAGA | |
| AATTCAGAGATGAGAAATGCTATAGAAAAACTCTTGGGTAAAAAGTTAACTATATTTATTA | |
| TAGGAGGAGTGTCCGTCCTCATGTAG | |
| AOLFR23 sequences: | |
| MAKNNLTRVTEFILMGFMDHPKLEIPLFLVFLSFYLVTLLGNVGMIMLIQVDVKIYTPMYFFLS | (SEQ ID NO: 45) |
| HLSLLDACYTSVITPQILATLATGKTVISYGHCAAQFFLFTICAGTECFLLAVMAYDRYAAIRNP | |
| LLYTVAMNPRLCWSLVVGAYVCGVSGAILRTTCTFTLSFCKDNQINFFFCDLPPLLKIACSDTA | |
| NIEIVIIFFGNFVILANASVILISYLLIIKTILKVKSSGGRAKTFSTCASHITAVALFFGALIFMYLQS | |
| GSGKSLEEDKVVSVFYTVVIPMLNPLIYSLRNKDVKDAFRKVARRLQVSLSM | |
| ATGGCCAAGAATAATCTCACCAGAGTAACCGAATTCATTCTCATGGGCTTTATGGACCACC | (SEQ ID NO: 46) |
| CCAAATTGGAGATTCCCCTCTTTCTGGTGTTTCTGAGTTTCTACCTAGTCACCCTTCTTGGG | |
| AATGTGGGGATGATTATGTTAATCCAAGTAGATGTCAAACTCTACACCCCAATGTACTTCT | |
| TCCTGAGCCACCTCTCCCTGCTGGATGCCTGTTACACCTCAGTCATCACCCCTCAGATCCTA | |
| GCCACATTGGCCACAGGCAAAACGGTCATCTCCTACGGCCACTGTGCTGCCCAGTTCTTTT | |
| TATTCACCATCTGTGCAGGCACAGAGTGCTTTCTGCTGGCAGTGATGGCCTATGATCGGTA | |
| TGCTGCCATTCGCAACCCACTGCTCTATACCGTGGCCATGAATCCCAGGCTCTGCTGGAGC | |
| CTGGTGGTAGGAGCCTATGTCTGTGGGGTGTCAGGAGCCATCCTGCGTACCACTTGCACCT | |
| TCACCCTCTCCTTCTGTAAGGACAATCAAATAAACTTGTTCTTCTGTGAGGTCCCACCCGTG | |
| CTGAAGCTTGCCTGCAGTGACACAGCAAACATCGAGATTGTCATCATCTTCTTTGGCAATT | |
| TTGTGATTTTGGCCAATGCCTCCGTCATCCTGATTTCGTATCTGCTCATCATCAAGACCATT | |
| TTGAAAGTGAAGTCTTCAGGTGGCAGGGCCAAGACTTTCTCCACATGTGCCTCTCACATCA | |
| CTGCTGTGGCGCTTTTCTTTGGAGCGCTTATCTTCATGTATGTGCAAAGTGGCTCAGGCAAA | |
| TCTCTGGAGGAAGACAAAGTCGTGTCTGTCTTCTATACAGTGGTCATCCCCATGCTGAACC | |
| CTCTGATCTACAGCTTAAGAAACAAAGATGTAAAAGACGCCTTCAGAAAGGTCGCTAGGA | |
| GACTCCAGGTGTCCCTGAGCATGTAG | |
| AOLFR25 sequences: | |
| METGNLTWVSDFVFLGLSQTRELQRFLFLMFLFVYITTVMGNILIIITVTSDSQLHTPMYFLLRN | (SEQ ID NO: 47) |
| LAVLDLCFSSVTAPKMLVDLLSEKKTISYQGCMGQIFFFHFLGGAMVFFLSVMAFDRLIAISRPL | |
| RYVTVMNTQLWVGLVVATWVGGFVHSIVQLALMLPLPFCGPNILDNFYCDVPQVLRLACTDT | |
| SLLEFLKISNSGLLDVVWFFLLLMSYLFILVMLRSHPGEARRKAASTCTTHHVVSMIFVPSIYLY | |
| ARPFTPFPMDKLVSIGHTVMTPMLNPMIYTLRNQDMQAAVRRLGRHRLV | |
| ATGGAAACAGGGAACCTCACGTGGGTATCAGACTTTGTCTTCCTGGGGCTCTCGCAGACTC | (SEQ ID NO: 48) |
| GGGAGCTCCAGCGTTTCCTGTTTCTAATGTTCCTGTTTGTCTACATCACCACTGTTATGGGA | |
| AACATCCTTATCATCATCACAGTGACCTCTGATTCCCAGCTCCACACACCCATGTACTTTCT | |
| GCTCCGAAACCTGGCTGTCCTAGACCTCTGTTTCTCTTCAGTCACTGCTCCCAAAATGCTAG | |
| TGGACCTCCTCTCTGAGAAGAAAACCATCTCTTACCAGGGCTGCATGGGTCAGATCTTCTT | |
| CTTCCACTTTTTGGGAGGTGCCATGGTCTTCTTCCTCTCAGTGATGGCCTTTGACCGCCTCA | |
| TTGCCATCTCCCGGCCCCTCCGCTATGTCACCGTCATGAACACTCAGCTCTGGGTGGGGCT | |
| GGTGGTAGCCACCTGGGTGGGAGGCTTTGTCCACTCTATTGTCCAGCTGGCTCTGATGCTC | |
| CCACTGCCCTTCTGTGGCCCCAACATTTTGGATAACTTCTACTGTGATGTTCCCCAAGTACT | |
| GAGACTTGCCTGCACTGACACCTCACTGCTGGAGTTCCTCAAGATCTCCAACAGTGGGCTG | |
| CTGGATGTCGTCTGGTTCTTCCTCCTCCTGATGTCCTACTTATTCATCCTGGTGATGCTGAG | |
| GTCACATCCAGGGGAGGCAAGAAGGAAGGCAGCTTCCACCTGCACCACCCACATCATCGT | |
| GGTTTCCATGATCTTCGTTCCAAGCATTTACCTCTATGCCCGGCCCTTCACTCCATTCCCTA | |
| TGGACAAGCTTGTGTCCATCGGCCACACAGTCATGACCCCCATGCTCAACCCCATGATCTA | |
| TACCCTGAGGAACCAGGACATGCAGGCAGCAGTGAGAAGATTAGGGAGACACCGGCTGGT | |
| TTGA | |
| AOLFR26 sequences: | |
| MAAKNSSVTEFILEGLTHQPGLRIPLFFLFLGFYTVTVVGNLGLITLIGLNSHLHTPMYFFLFNLS | (SEQ ID NO: 49) |
| LIDFCFSTTITPKMLMSFVSRKNIISFTGCMTQLFFFCFFVVSESFILSAMAYDRYVAICNPLLYT | |
| VTMSCQVCLLLLLGAYGMGFAGAMAHTGSIMNLTFCADNLVNHFMCDILPLLELSCNSSYMN | |
| ELVVFIVVAVDVGMPIVTVFISYALILSSILHNSSTEGRSKAFSTCSSHIIVVSLFFGSGAFMYLKP | |
| LSILPLEQGKVSSLFYTIIVPVLNPLIYSLRNKDVKVALRRTLGRKIFS | |
| ATGGCAGCCAAAAACTCTTCTGTGACAGAGTTTATCCTCGAAGGCTTAACCCACCAGCCGG | (SEQ ID NO: 50) |
| GACTGCGGATCCCCCTCTTCTTCCTGTTTCTGGGTTTCTACACGGTCACCGTGGTGGGGAA | |
| CCTGGGCTTGATAACCCTGATTGGGCTGAACTCTCACCTGCACACTCCCATGTACTTCTTCC | |
| TTTTTAACCTCTCTTTAATAGATTTCTGTTTCTCCACTACCATCACTCCCAAAATGCTGATG | |
| AGTTTTGTCTCAAGGAAGAACATCATTTCCTTCACAGGGTGTATGACTCAGCTCTTCTTCTT | |
| CTGCTTCTTTGTCGTCTCTGAGTCCTTCATCCTGTGAGCGATGGCGTATGACCGCTACGTGG | |
| CCATCTGTAACCCACTGTTGTACACAGTCACCATGTCTTGCCAGGTGTGTTTGCTCCTTTTG | |
| TTGGGTGCCTATGGGATGGGGTTTGCTGGGGCCATGGCCCACACAGGAAGCATAATGAAC | |
| CTGACCTTCTGTGCTGACAACCTTGTCAATCATTTCATGTGTGACATCCTTCCTCTCCTTGA | |
| GCTCTCCTGCAACAGCTCTTACATGAATGAGCTGGTGGTCTTTATTGTGGTGGCTGTTGAC | |
| GTTGGAATGCCCATTGTCACTGTCTTTATTTCTTATGCCCTCATCCTCTCCAGCATTCTACA | |
| CAACAGTTCTACAGAAGGCAGGTCCAAAGCCTTTAGTACTTGCAGTTCCCACATAATTGTA | |
| GTTTCTCTTTCTTTGGTTCTGGTGCTTTCATGTATCTCAAACCCCTTTCCATCCTGCCCCTC | |
| GAGCAAGGGAAAGTGTCCTCCCTGTTCTATACCATAATAGTCCCCGTGTTAAACCCATTAA | |
| TCTATAGCTTGAGGAACAAGGATGTCAAAGTTGCCCTGAGGAGAACTTTGGGCAGAAAAA | |
| TCTTTTCTTAA | |
| AOLFR27 sequences: | |
| MPSQNYSIISEFNLFGFSAFPQHLLPILFLLYLLMFLFTLLGNLLIMATIWIEHRLHTPMYLFLCTL | (SEQ ID NO: 51) |
| SVSEILFTVAITPRMLADLLSTHHSITFVACANQMFFSFMFGFTHSFLLLVMGYDRYVAICHPLR | |
| YNVLMSPRDCAHLVACTWAGGSVMGMMVTTIVFHLTFGGSNVIHHFFCHVLSLLKLACENKT | |
| SSVIMGVMLVCVTALIGCLFLIILSYVFIVAAILRIPSAEGRHKTFSTCVSHLTVVVTHYSFASFIY | |
| LKPKGLHSMYSDALMATTYTVFTPFLSPIIFSLRNKELKNAINKNFYRKFCPPSS | |
| ATGCCTAGTCAGAACTATAGCATCATATCTGAATTTAACCTCTTTGGCTTCTCAGCCTTCCC | (SEQ ID NO: 52) |
| CCAGCAGCTCCTGCCCATCTTGTTCCTGCTGTACCTCCTGATGTTCCTGTTCACATTGCTGG | |
| GCAACCTTCTCATCATGGCCACAATCTGGATTGAACACAGACTCCACACACCCATGTACCT | |
| CTTCTTGTGCACCCTCTCCGTCTCTGAGATTCTGTTCACTGTTGCCATCACCCCTCGCATGC | |
| TGGCTGATCTGCTTTCCACCCATCATTCCATCACCTTTGTGGCTTGTGCCAACCAGATGTTC | |
| TTCTCCTTCATGTTTGGCTTCACTCACTCCTTCCTTCTCCTGGTCATGGGCTATGATCGCTA | |
| TGTGGCCATCTGCCACCCACTGCGTTACAATGTGCTCATGAGCCCCCGTGACTGTGCCCAT | |
| CTTGTGGCCTGTACCTGGGCTGGTGGCTCAGTCATGGGGATGATGGTGACAACGATAGTTT | |
| TCCACCTCACTTTCTGTGGGTCTAATGTGATCCACCATTTTTTCTGTCATGTGCTTTCCCTCT | |
| TGAAGTTGGCCTGTGAAAACAAGACATCATCTGTCATCATGGGTGTGATGCTGGTGTGTGT | |
| CACAGCCCTGATAGGCTGTTTATTCCTCATCATCCTCTCCTATGTCTTCATTGTGGCTGCCA | |
| TCTTGAGGATTCCCTCTGCCGAAGGCCGGCACAAGACATTTTCTACGTGTGTATCCCACCT | |
| CACTGTGGTGGTCACGCACTATAGTTTTGCCTCCTTTATCTACCTCAAGCCCAAGGGCCTCC | |
| ATTCTATGTACAGTGACGCCTTGATGGCCACCACCTATACTGTCTTCACCCCCTTCCTTAGC | |
| CCAATCATTTTCAGCCTAAGGAACAAGGAGCTGAAGAATGCCATAAATAAAAACTTTTACA | |
| GAAAATTCTGTCCTCCAAGTTCCTGA | |
| AOLFR28 sequences: | |
| MPNFTDVTEFTLLGLTCRQELQVLFFVVFLAVYMITLLGNIGMIILISISPQLQSPMYFFLSHLSF | (SEQ ID NO: 53) |
| ADVCFSSNVTPKMLENLLSETKTISYVGCLVQCYFFIAVVHVEVYILAVMAFDRYMAGCXPLL | |
| YGSKMSRTVCVRLSVXYXYGFSVSLICTLWTYGLYFCGNFEINHFYCADPPLIQIACGRVHIKE | |
| ITMIVIAGINFTYSLSVVLISYTLIVVAVLRMRSADGRRKAFSTCGSHLTAVSMFYGTPIFMYLR | |
| RPTEESVEQGKMVAVFYTTVIPMLNPMIYSLRNKDVKEAVNKAITKTYVRQ | |
| ATGCCTAATTTCACGGATGTGACAGAATTTACTCTCCTGGGGCTGACCTGTCGTCAGGAGC | (SEQ ID NO: 54) |
| TACAGGTTCTCTTTTTTGTGGTGTTCCTAGCGGTTTACATGATCACTCTGTTGGGAAATATT | |
| GGTATGATCATTTTGATTAGCATCAGTCCTCAGCTTCAGAGTCCCATGTACTTTTTCCTGAG | |
| TCATCTGTCTTTTGCGGACGTGTGCTTCTCCTCCAACGTTACCCCCAAAATGCTGGAAAACT | |
| TATTATCAGAGACAAAAACCATTTCCTATGTGGGATGCTTGGTGCAGTGCTACTTTTTCAT | |
| TGCCGTTGTCCACGTGGAGGTCTATATCCTGGCTGTGATGGCCTTTGACAGGTACATGGCC | |
| GGCTGCAANCCTCTGCTTTATGGCAGTAAAATGTCTAGGACTGTGTGTGTTCGGCTCATCT | |
| CTGTGNNNTATGNNTATGGATTCTCTGTCAGCCTAATATGCACACTATGGACTTATGGGTT | |
| ATACTTCTGTGGAAACTTTGAAATCAATCACTTCTATTGTGCAGATCCCCCTCTCATCCAGA | |
| TTGCCTGTGGGAGAGTGCACATCAAAGAAATCACAATGATTGTTATTGCTGGAATTAACTT | |
| CACATATTCCCTCTCGGTGGTCCTCATCTCCTACACTCTCATTGTAGTAGCTGTGCTACGCA | |
| TGCGCTCTGCCGATGGCAGGAGGAAGGCGTTCTCCACCTGTGGGTCCCACTTGACGGCTGT | |
| TTCTATGTTTTATGGGACCCCCATCTTCATGTATCTCAGGAGACCCAGTGAGGAATCCGTA | |
| GAGCAGGGCAAAATGGTGGCTGTGTTTTACACCACAGTATTCCTATGTTGAATCCCATGA | |
| TCTACAGTCTGAGAAATAAGGATGTAAAAGAAGCAGTCAACAAAGCAATCACCAAGACAT | |
| ATGTGAGGCAGTAA | |
| AOLFR29 sequences: | |
| MMSFAPNASHSPVFLLLGFSRANISYTLLFFLFLAIYLTTILGNVTLVLLISWDSRLHSPMYYLLR | (SEQ ID NO: 55) |
| GLSVIDMGLSTVTLPQLLAHLVSHYPTIPAARCLAQFFFFYAFGVTDTLVIAVMALDRYVAICD | |
| PLHYALVMNHQRCACLLALSWVVSILHTMLRVGLVLPLCWTGDAGGNVNLPHFFCDHRPLLR | |
| ASCSDIHSNELAIFFEGGFLMLGPCALIVLSYVRIGAAILRLPSAAGRRRAVSTCGSHLTMVGFL | |
| YGTIICVYFQPPFQNSQYQDMVASVMYTAITPLANPFVYSLHNKDVKGALCRLLEWVKVDP | |
| ATGATGAGCTTTGCCCCTAATGCTTCACACTCTCCGGTTTTTTTGCTCCTTGGGTTCTCGAG | (SEQ ID NO: 56) |
| AGCTAACATCTCCTACACTCTCCTCTTCTTCCTGTTCCTGGCTATTTACCTGACCACCATAC | |
| TGGGGAATGTGACACTGGTGCTGCTCATCTCCTGGGACTCCAGACTGCACTCACCCATGTA | |
| TTATCTGCTTCGTGGCCTCTCTGTGATAGACATGGGGCTATCCACAGTTACACTGCCCCAG | |
| TTGCTGGCCCATTTGGTCTCTCATTACCCACCATTCCTGCTGCCCGCTGCTTGGCTCAGTT | |
| CTTTTTCTTCTATGCATTTGGGGTTACAGATACACTTGTCATTGCTGTCATGGCTCTGGATC | |
| GCTATGTGGCCATCTGTGACGCCCTGCACTATGCTTTGGTAATGAATCACCAACGGTGTGC | |
| CTGCTTACTAGCCTTGAGCTGGGTGGTGTCCATACTGCACACCATGTTGCGTGTGGGACTC | |
| GTCCTGCCTCTTTGCTGGACTGGGGATGCTGGGGGCAACGTTAACCTTCCTCACTTCTTTTG | |
| TGACCACCGGCCACTTCTGCGAGCCTCTTGTTCTGACATACATTCTAATGAGCTGGCCATA | |
| TTCTTTGAGGGTGGCTTCCTTATGCTGGGCCCCTGTGCCCTCATTGTACTCTCTTATGTCCG | |
| AATTGGGGCCGCTATTCTACGTTTGCCTTCAGCTGCTGGTCGCCGCCGAGCAGTCTCCACC | |
| TGTGGATCCCACCTCACCATGGTTGGTTTCCTCTACGGCACCATCATTTGTGTCTACTTCCA | |
| GCCTCCCTTCCAGAACTCTCAGTATCAGGACATGGTGGCTTCAGTAATGTATACTGCCATT | |
| ACACCTTTGGCCAACCCATTTGTGTATAGCCTCCACAATAAGGATGTCAAGGGTGCACTCT | |
| GCAGGCTGCTTGAATGGGTGAAGGTAGACCCCTGA | |
| AOLFR30 sequences: | |
| MGFLSPMHPCRPPTQRRMAAGNHSTVTEFILKGLTKRADLQLPLFLLFLGIYLVTIVGNLGMIT | (SEQ ID NO: 57) |
| LICLNSQLHTPMYYFLSNLSLMDLCYSSVITPKMLVNFVSEKNIISYAGCMSQLYFFLVFVIAEC | |
| YMLTVMAYDRYVXXCHPLLYNIIMSHHTCLLLVAVVYAIGLIGSTIETGLMLKIPYCEHLISHY | |
| FCDILPLMKLSCSSTYDVEMTVFFSAGFNIIVTSLTVLVSYTFILSSILGISTTEGRSKAFSTCSSHL | |
| AAVGMFYGSTAFMYLKPSTISSLTQENVASVFYTTVIPMLNPLIYSLRNKEVKAAVQKTLRGK | |
| LF | |
| ATGGGGTTCTTGTCTCCCATGCATCCCTGCAGGCCTCCCACCCAGAGGAGAATGGCTGCAG | (SEQ ID NO: 58) |
| GAAATCACTCTACAGTGACAGAGTTCATTCTCAAGGGTTTAACGAAGAGAGCAGACCTCC | |
| AGCTCCCCCTCTTTCTCCTCTTCCTCGGGATCTACTTGGTCACCATCGTGGGGAACCTGGGC | |
| ATGATCACTCTAATTTGTCTGAACTCTCAGCTGCACACCCCCATGTACTACTTTCTCAGCAA | |
| TCTGTCACTCATGGATCTCTGCTACTCCTCCGTCATTACCCCTAAGATGCTGGTGAACTTTG | |
| TGTCAGAGAAAAACATCATCTCCTACGCAGGGTGCATGTCACAGCTCTACTTCTTCCTTGT | |
| TTTTGTCATTGCTGAGTGTTACATGCTGACAGTGATGGCCTACGACCGCTATGTTGNCNTC | |
| TGCCACCCTTTGCTTTACAACATCATTATGTCTCATCACACCTGCCTGCTGCTGGTGGCTGT | |
| GGTCTACGCCATCGGACTCATTGGCTCCACAATAGAAACTGGCCTCATGTTAAAACTGCCC | |
| TATTGTGAGCACCTCATCAGTCACTACTTCTGTGACATCCTCCCTCTCATGAAGCTGTCCTG | |
| CTCTAGCACCTATGATGTTGAGATGACAGTCTTCTTTTCGGCTGGATTCAACATCATAGTC | |
| ACGAGCTTAACAGTTCTTGTTTCTTACACCTTCATTCTCTCCAGCATCCTCGGCATCAGCAC | |
| CACAGAGGGGAGATCCAAAGCCTTCAGCACCTGCAGCTCCCACCTTGCAGCCGTGGGAAT | |
| GTTCTATGGATCAACTGCATTCATGTACTTAAAACCCTCCACAATCAGTTCCTTGACCCAG | |
| GAGAATGTGGCCTCTGTGTTCTACACCACCGGTAATCCCCATGTTGAATCCCCTAATCTACA | |
| GCCTGAGGAACAAGGAAGTAAAGGCTGCCGTGCAGAAAACGCTGAGGGGTAAACTGTTTT | |
| GA | |
| AOLFR31 sequences: | |
| MGTGNDTTVVEFTLLGLSEDTTVCAILFLVFLGIYVVTLMGNISIIVLIRRSHHLHTPMYIFLCHL | (SEQ ID NO: 59) |
| AFVDIGYSSSVTPVMLMSFLRKETSLPVAGCVAQLCSVVTFGTAECFLLAAMAYDRYVAICSP | |
| LLYSTCMSPGVCIILVGMSYLGGCVNAWTFIGCLLRLSFCGPNKVNHFFCDYSPLLKLACSHDF | |
| TFEIIPAISSGSIIVATVCVIAISYIYILITILKMHSTKGRHKAFSTCTSHLTAVTLFYGTITFIYVMP | |
| KSSYSTDQNKVVSVFYTVVIPMLNPLIYSLRNKEIKGALKRELRIKIFS | |
| ATGGGGACTGGAAATGACACCACTGTGGTAGAGTTTACTCTTTTGGGGTTATCTGAGGATA | (SEQ ID NO: 60) |
| CTACAGTTTGTGCTATTTTATTTCTTGTGTTTCTAGGAATTTATGTTGTCACCTTAATGGGT | |
| AATATCAGCATAATTGTATTGATCAGAAGAAGTCATCATCTTCATACACCCATGTACATTT | |
| TCCTCTGCCATTTGGCCTTTGTAGACATTGGGTACTCCTCATCAGTCACACCTGTCATGCTC | |
| ATGAGCTTCCTAAGGAAAGAAACCTCTCTCCCTGTTGCTGGTTGTGTGGCCCAGCTCTGTT | |
| CTGTAGTGACGTTTGGTACGGCCGAGTGCTTCCTGCTGGCTGCCATGGCCTATGATCGCTA | |
| TGTGGCCATCTGCTCACCCCTGCTCTACTCTACCTGCATGTCCCCTGGAGTCTGCATCATCT | |
| TAGTGGGCATGTCCTACCTGGGTGGATGTGTGAATGCTTGGACATTCATTGGCTGCTTATT | |
| AAGACTGTCCTTCTGTGGGCCAAATAAAGTCAATCACTTTTTCTGTGACTATTCACCACTTT | |
| TGAAGCTTGCTTGTTCCCATGATTTTACTTTTGAAATAATTCCAGCTATCTCTTCTGGATCT | |
| ATCATTGTGGCCACTGTGTGTGTCATAGCCATATCCTACATCTATATGCTCATCACCATCCT | |
| GAAGATGCACTCCACCAAGGGCCGCCACAAGGCCTTCTCCACCTGCACCTCCCAGCTCACT | |
| GCAGTCACTCTGTTCTATGGGACCATTAGCTTCATTTATGTGATGCCCAAGTCCAGCTACTC | |
| AACTGACCAGAACAAGGTGGTGTCTGTGTTCTACACCGTGGTGATTCCCATGTTGAACCCC | |
| CTGATCTACAGCCTCAGGAACAAGGAGATTAAGGGGGCTCTGAAGAGAGAGCTTAGAATA | |
| AAAATATTTTCTTGA | |
| AOLFR32 sequences: | |
| MNSLKDGNHTALTGFILLGLTDDPILRVILFMIILSGNLSIIILIRSSQLHHPMYFFLSHLAFADM | (SEQ ID NO: 61) |
| AYSSSVTPNMLVNFLVERNTVSYLGCAIQLGSAAFFATVECVLLAAMAYDRFVAICSPLLYSTK | |
| MSTQVSVQLLLVVYIAGFLIAVSYTTSFYFLLFCGPNQVNHFFCDFAPLLELSCSDISVSTVVLSF | |
| SSGSIIVVTVCVIAVCYIYILITILKMRSTEGHHKAFSTCTSHLTVVTLFYGTITFIYVMPNFSYST | |
| DQNKVVSVLYTVVIPMLNPLIYSLRNKEIKGALKRELVRKILSHDACYFSRTSNNDIT | |
| ATGAATTCCCTGAAGGACGGGAATGACACCGCTCTGACGGGGTTCATCCTATTGGGCTTAA | (SEQ ID NO: 62) |
| CAGATGATCCAATCGTTCGAGTCATCCTCTTCATGATCATCCTATCTGGTAATCTCAGCATA | |
| ATTATTCTTATCAGAATTTCTTCTCAGCTCCATCATCCTATGTATTTCTTTCTGAGCCACTT | |
| GGGTTTTGCTGACATGGCCTATTCATCTTCTGTCACACCCAACATGCTTGTAAACTTCCTGG | |
| TGGAGAGAAATACAGTCTCCTACCTTGGATGTGCCATCCAGCTTGGTTCAGCGGCTTTCTT | |
| TGCAACAGTCGAATGCGTCCTTCTGGCTGCCATGGCCTATGACCGCTTTGTGGCAATTTGC | |
| AGTCCACTGCTTTATTCAACCAAAATGTCCACACAAGTCAGTGTCCAGCTACTCTTAGTAG | |
| TTTAGATAGCTGGTTTTCTCATTGCTGTCTCCTATACTACTTCCTTCTATTTTTTACTCTTCT | |
| GTGGACCAAATCAAGTCAATCATTTTTTCTGTGATTTCGCTCCCTTACTTGAACTCTCCTGT | |
| TCTGATATCAGTGTCTCCACAGTTGTTCTCTCATTTTCTTCTGGATCCATCATTGTGGTCAC | |
| TGTGTGTGTCATAGCCGTCTGCTACATCTATATCCTCATCACCATCCTGAAGATGCGCTCCA | |
| CTGAGGGGCACCAGAAGGCCTTCTCCACCTGCACTTCCCACCTCACTGTGGTTACCCTGTT | |
| CTATGGGACCATTACCTTCATTTATGTGATGCCCAATTTTAGCTACTCAACTGACCAGAAC | |
| AAGGTGGTGTCTGTGTTGTACACAGTGGTGATTCCCATGTTGAACCCCCTGATCTACAGCC | |
| TCAGGAACAAGGAGATTAAGGGGGCTCTGAAGAGAGAGCTTGTTAGAAAAATACTTTCTC | |
| ATGATGCTTGTTATTTTAGTAGAACTTCAAATAATGATATTACATAG | |
| AOLFR34 sequences: | |
| MLEGVEHLLLLLLLTDVNSKELQSGNQTSVSHFILVGLHHPPQLGAPLFLAFLVIYLLTVSGNG | (SEQ ID NO: 63) |
| LIILTVLVDIRLHRPMCLFLCHLSFLDMTISCAIVPKMLAGFLLGSRIISFGGCVIQLFSFHFLGCT | |
| ECFLYTLMAYDRFLAICKPLHYATIMTHRVCNSLALGTWLGGTIHSLFQTSFVFRLPFCGPNRV | |
| DYIFCDIPAMLRLACADTAINELVTFADIGFLALTCFMLILTSYGYIVAAILRIPSADGRRNAFST | |
| CAAHLTVVIVYYVPCTFIYLRPCSQEPLDGVVAVFYTVITPLLNSIIYTLCNKEMKAALQRLGG | |
| HKEVQPH | |
| ATGTTAGAGGGTGTTGAGCATCTCCTTCTGCTACTTCTTTTGACAGATGTGAACAGCAAGG | (SEQ ID NO: 64) |
| AACTGCAAAGTGGAAACCAGACTTCTGTGTGTCACTTCATTTTGGTGGGCCTGCACCACCC | |
| ACCACAGCTGGGAGCGCCACTCTTCTTAGCTTTCCTTGTCATCTATCTCCTCACTGTTTCTG | |
| GAAATGGGCTCATCATCCTCACTGTCTTAGTGGACATCCGGCTCCATCGTCCCATGTGCTT | |
| GTTCCTGTGTCACCTCTCCTTCTTGGACATGACCATTTCTTTGTGCTATTGTCCCCAAGATGC | |
| TGGCTGGCTTTCTCTTGGGTAGTAGGATTATCTCCTTTGGGGGCTGTGTAATCCAACTATTT | |
| TCTTTCCATTTCCTGGGCTGTACTGAGTGCTTCCTTTACACACTCATGGCTTATGACCGTTT | |
| CCTTGCCATTTGTAAGCCCTTACACTATGCTACCATCATGACCCACAGAGTCTGTAACTCCC | |
| TGGCTTTAGGCACCTGGCTGGGAGGGACTATCCATTCACTTTTCCAAACAATTTTGTATT | |
| CCGGCTGCCCTTCTGTGGCCCCAATCGGGTCGACTACATCTTCTGTGACATTCCTGCGATGC | |
| TGCGTCTAGCCTGCGCCGATACGGCCATCAACGAGCTGGTCACCTTTGCAGACATTGGCTT | |
| CCTGGCCCTCACCTGCTTCATGCTCATCCTCACTTCCTATGGCTATATTGTAGCTGCCATCC | |
| TGCGAATTCCGTCAGCAGATGGGCGCCGCAATGCCTTCTCCACTTGTGCTGCGCACCTCAC | |
| TGTTGTCATTGTTTACTATGTGCCCTGCACCTTCATTTACCTGCGGCCTTGTTCACAGGAGC | |
| CCCTGGATGGGGTGGTAGCTGTCTFFTTACACTGTCATCACTCCCTTGCTTAACTCCATCATC | |
| TACACACTGTGCAACAAAGAAATGAAGGCAGCATTACAGAGGCTAGGGGGCCACAAGGAA | |
| GTGCAGCCTCACTGA | |
| AOLFR35 sequences: | |
| MEPLNRTEVSEFFLKGFSGYPALEHLLFPLCSAMYLVTLLGNTAIMAVSVLDIHLHTPVYFFLG | (SEQ ID NO: 65) |
| NLSTLDICYTPTFVPLMLVHLLSSRKTISFAVCAIQMCLSLSTGSTECLLLAITAYDRYLAICQPL | |
| RYHVLMSHRLCVLLMGAAWVLCLLKSVTEMVISMPLPFCGHHVVSHFTCKILAVLKLACGNT | |
| SVSEDFLLAGSILLLPVPLAFICLSYLLILATILRVPSAARCCKAFSTCLAHLAVVLLFYGTIIFMY | |
| LKPKSKEAHISDEVFTVLYAMVTTMLNPTIYSLRNKEVKEAARKVWGRSRASR | |
| ATGGAGCCGCTCAACAGAACAGAGGTGTCCGAGTTCTTTCTGAAAGGATTTTCTGGCTACC | (SEQ ID NO: 66) |
| CAGCCCTGGAGCATCTGCTCTTCCCTCTGTGCTCAGCCATGTACCTGGTGACCCTCCTGGG | |
| GAACACAGCCATCATGGCGGTGAGCGTGCTAGATATCCACCTGCACACGCCCGTGTACTTC | |
| TTCCTGGGCAACCTCTCTACCCTGGACATCTGCTACACGCCCACCTTTGTGCCTCTGATGCT | |
| GGTCCACCTCCTGTCATCCCGGAAGACCATCTCCTTTGCTGTCTGTGCCATCCAGATGTGTC | |
| TGAGCCTGTCCACGGGCTCCACGGAGTGCCTGCTACTGGCCATCACGGCCTATGACCGCTA | |
| CCTGGCCATCTGCCAGCCACTCAGGTACCACGTGCTCATGAGCCACCGGCTCTGCGTGCTG | |
| CTGATGGGAGCTGCCTGGGTCCTCTGCCTCCTCAAGTCGGTGACTGAGATGGTCATCTCCA | |
| TGAGGCTGCCCTTCTGTGGCCACCACGTGGTCAGTCACTTCACCTGCAAGATCCTGGCAGT | |
| GCTGAAGCTGGCATGCGGCAACACGTCGGTCAGCGAAGAGTTCCTGCTGGCGGGCTCGAT | |
| CCTGCTGCTGCCTGTACCCCTGGCATTCATCTGCCTGTCCTACTTGCTCATCCTGGCCACCA | |
| TCCTGAGGGTGCCCTCGGCCGCCAGGTGCTGCAAAGCCTTCTCCACCTGCTTGGCACACCT | |
| GGCTGTAGTGCTGCTTTTCTACGGCACCATCATCTTCATGTACTTGAAGCCCAAGAGTAAG | |
| GAAGCCCACATCTCTGATGAGGTCTTCACAGTCCTCTATGCCATGGTCACGACCATGCTGA | |
| ACCCCACCATCTACAGCCTGAGGAACAAGGAGGTGAAGGAGGCCGCCAGGAAGGTGTGGG | |
| GCAGGAGTCGGGCCTCCAGGTGA | |
| AOLFR36 sequences: | |
| MYLVTVLRNLLSILAVSSDSHPHTPMYFFLSNLCWADIGFTLATVPKMIVDMGSHSKVISYGG | (SEQ ID NO: 67) |
| CLTQMSFLVLFACIVDMFLTVMAYDCFVAICRPLHYPVIVNPHLCVFFVLVSFFLSLLDSQLHS | |
| WIVLQFTFFKNVEISNFVCEPSQLLKLASYDSVINSIFIYFDNTMFGFLPISGILLSYYKIVPSILRIS | |
| SSDGKYKAFSACGCHLAVVCLFYGTGIGVYLTSAVAPPLRNGMVASVMYAVVTPMLNPFIYS | |
| LRNRDIQSALWRVCNKTVESHDLFHPFSCVVEKGQPHSIPTSANPAP | |
| ATGTATCTGGTCACGGTGCTGAGGAACCTGCTCAGCATCCTGGCTGTCAGCTCTGACTCCC | (SEQ ID NO: 68) |
| AGCCCCACACACCCATGTACTTCTTCCTCTCCAACCTGTGCTGGGCTGACATCGGTTTCACC | |
| TTGGCCAGGGTTCCCAAAATGATTGTGGACATGGGGTCGCATAGCAAAGTCATCTCTTATG | |
| GGGGCTGCCTGACACAGATGTCTTTCTTGGTACTTTTTGCATGTATAGTAGACATGTTCCT | |
| GACTGTGATGGCTTATGACTGCTTTGTAGCCATCTGTCGCCCTCTGCACTACCCAGTCATC | |
| GTGAATCCTCACCTCTGTGTCTTCTTCGTTTTGGTGTCCTTTTTCCTTAGCCTGTTGGATTCC | |
| CAGCTGCACAGTTGGATTGTGTTACAATTCACCTTCTTCAAGAATGTGGAAATCTCTAATT | |
| TTGTCTGTGAGCCATCTCAACTTCTCAAGCTTGCCTCTTATGACAGCGTCATCAATAGGATA | |
| TTCATATATTTTGATAATACTATGTTTGGTTTTCTTCCCATTTCAGGGATCCTTTTGTCTTAC | |
| TATAAAATTGTCCCCTCCATTCTAAGGATTTCATCATCAGATGGGAAGTACAAAGCCTTCT | |
| CAGCCTGTGGCTGTCACCTGGCAGTTGTTTGCTTATTTTATGGAACAGGCATTGGCGTGTA | |
| CCTGACTTCAGCTGTGGCACCACCCCTCAGGAATGGTATGGTGGCGTCAGTGATGTAGGCT | |
| GTGGTCACCCCCATGCTGAACCCTTTCATCTACAGCCTGAGAAACAGGGACATTCAAAGTG | |
| CCCTGTGGAGGGTGTGCAACAAAACAGTCGAATCTCATGATCTGTTCCATCCTTTTTCTTG | |
| TGTGGTTGAGAAAGGGCAACCACATTGAATCCCTACATCTGCAAATCGTGCCCCTTAG | |
| AOLFR37 sequences: | |
| MEKANETSPVMGFVLLRLSAHPELEKTFFVLILLMYLVILLGNGVLILVTILDSRLHTPMYFFLG | (SEQ ID NO: 69) |
| NLSFLDICFTTSSVPLVLDSFLTPQETISFSACAVQMALSFAMAGTECLLLSMMAFDRYVAICNP | |
| LRYSVIMSKAAYMPMAASSWAIGGAASVVHTSLAIQLPFCGDNVINHFTCEILAVLKLACADIS | |
| INVISMEVTNVIFLGVPVLFISFSYVFIITTILRIPSAEGRKKVFSTCSAHLTVVIVFYGTLFFMYG | |
| KPKSKDSMGADKEDLSDKLIPLFYGVVTPMLNPIIYSLRNKDVKAAVRRLLRPKGFTQ | |
| ATGGAAAAAGCCAATGAGACCTCGCCTGTGATGGGGTTCGTTCTCCTGAGGCTGTCTGCCC | (SEQ ID NO: 70) |
| ACCCAGAGCTGGAAAAGACATTCTTCGTGCTCATCCTGCTGATGTACCTCGTGATCCTGCT | |
| GGGCAATGGGGTCCTCATCCTGGTGACCATCCTTGACTCCGGCCTGCACACGCCCATGTAG | |
| TTCTTCCTAGGGAACCTCTCCTTCCTGGACATCTGCTTCACTACCTCCTCAGTCCCACTGGT | |
| CCTGGACAGCTTTTTGACTCCCCAGGAAACCATCTCCTTCTCAGCCTGTGCTGTGCAGATG | |
| GCACTCTCCTTTGCCATGGCAGGAACAGAGTGCTTGCTCCTGAGCATGATGGCATTTGATC | |
| GCTATGTGGCCATCTGCAACCCCCTTAGGTACTCCGTGATCATGAGCAAGGCTGCCTACAT | |
| GCCCATGGCTGCCAGCTCCTGGGCTATTGGTGGTGCTGCTTCCGTGGTACACACATCCTTG | |
| GCAATTCAGCTGCCCTTCTGTGGAGACAATGTCATCAACCACTTCACCTGTGAGATTCTGG | |
| CTGTTCTAAAGTTGGCCTGTGCTGACATTTCCATCAATGTGATCAGCATGGAGGTGACGAA | |
| TGTGATCTTCCTAGGAGTCCCGGTTCTGTTCATCTCTTTCTCCTATGTCTTCATCATCACCA | |
| CCATCCTGAGGATCCCCTCAGCTGAGGGGAGGAAAAAGGTCTTCTCCACCTGCTCTGCCCA | |
| CCTCACCGTGGTGATCGTCTTCTACGGGACCTTATTCTTCATGTATGGGAAGCCTAAGTCT | |
| AAGGACTCCATGGGAGCAGACAAAGAGGATCTTTCAGACAAACTCATCCCCCTTTTCTATG | |
| GGGTGGTGACCCCGATGCTCAACCCCATCATCTATAGCCTGAGGAACAAGGATGTGAAGG | |
| CTGCTGTGAGGAGACTGCTGAGACCAAAAGGCTTCACTCAGTGA | |
| AOLFR38 sequences: | |
| MYLVTVLRNLLIILAVSSDSHLHTPMCFFLSNLCWADIGFTSAMVPKMIVDMQSHSRVISYAGC | (SEQ ID NO: 71) |
| LTQMSFFVLFACIEDMLLTVMAYDRFVAICHPLHYPVIMNPHLGVFLVLVSFFLSLLDSQLHSW | |
| IVLQFTFFKNVEISNFVCDPSQLLNLACSDSVINSIFIYLDSIMFGFLPISGILLSYANNVPSILRISS | |
| SDRKSKAFSTCGSHLAVVCLFYGTGIGVYLTSAVSPPPRNGVVASVMYAVVTPMLNPFIYSLR | |
| NRDIQSALWRLRSRTVESHDLLSQDLLHPFSCVGEKGQPH | |
| ATGTACCTGGTCACGGTGCTGAGGAACCTGCTCATCATCCTGGCTGTCAGCTCTGACTCCC | (SEQ ID NO: 72) |
| ACCTCCACACCCCCATGTGCTTCTTCGTCTCCAACCTGTGCTGGGCTGACATCGGTTTCACC | |
| TCGGCCATGGTTCCCAAGATGATTGTGGACATGCAGTCGCATAGCAGAGTCATCTCTTATG | |
| CGGGCTGCCTGACACAGATGTCTTTCTTTGTCCTTTTTGCATGTATAGAAGACATGCTCCTG | |
| ACAGTGATGGCCTATGACCGATTTGTGGCCATCTGTCACCCCCTGGACTACCCAGTCATCA | |
| TGAATCCTCACCTTGGTGTCTTCTTAGTTTTGGTGTCCTTTTTCCTCAGCCTGTTGGATTCC | |
| CAGCTGCACAGTTGGATTGTGTTACAATTCACCTTCTTCAAGAATGTGGAAATCTCCAATT | |
| TTGTCTGTGACCCATGTCAACTTCTCAACCTTGCCTGTTCTGACAGTGTCATCAATAGGATA | |
| TTCATATATTTAGATAGTATTATGTTTGGTTTTCTTCCCATTTCAGGGATCCTTTTGTCTTAC | |
| GCTAACAATGTCCCCTCCATTCTAAGAATTTCATCATCAGATAGGAAGTCTAAAGCCTTCT | |
| CCACCTGTGGCTCTCACCTGGCAGTTGTTTGCTTATTTTATGGAACAGGCATTGGCGTGTA | |
| CCTGACTTCAGCTGTGTCACCACCCCCCAGGAATGGTGTGGTGGCATCAGTGATGTACGCT | |
| GTGGTCACCCCCATGCTGAACCCTTTCATCTACAGCCTGAGAAATAGGGACATTCAAAGTG | |
| CCCTGTGGAGGCTGGGCAGCAGAACAGTCGAATCTCATGATCTGTTATGTCAAGATCTGCT | |
| CCATCCTTTTTCTTGTGTGGGTGAGAAAGGTCAACCACATTAA | |
| AOLFR39 sequences: | |
| MGVKNHSTVTEFLLSGLTEQAELQLPLFCLFLGIYTVTVVGNLSMISIIRLNRQLHTPMYYFLSS | (SEQ ID NO: 73) |
| LSFLDFGYSSVITPKMLSGFLCRDRSISYSGCMIQLFFFCVCVISECYMLAAMAGDRYVAICSPL | |
| LYRVIMSPRVCSLLVAAVFSVGFTDAVIHGGCILRLSFCGSNIIKHYFCDIVPLIKISCSSTYIDEL | |
| LIFVIGGFNMVATSLTIIISYAFILTSILRIHSKKGRCKAFSTCSSHLTAVLMFYGSLMSMYLKPAS | |
| SSSLTQEKVSSVFYTTVILMLNPLIYSLRNNEVRNALMKLLRRKISLSPG | |
| ATGGGTGTAAAAAACCATTCCACAGTGACTGAGTTTCTTCTTTCAGGATTAACTGAACAAG | (SEQ ID NO: 74) |
| CAGAGCTTCAGCTGCCCCTCTTCTGCCTCTTCTTAGGAATTTACACAGTTACTGTGGTGGG | |
| AAACCTCAGCATGATCTCAATTATTAGGGTGAATCGTCAACTTCATACCCCCATGTACTAT | |
| TTCCTGAGTAGTTTGTCTTTTTTAGATTTCTGCTATTCTTCTGTCATTACCCCTAAAATGCT | |
| ATCAGGGTTTTTATGCAGAGATAGATCCATCTCCTATTCTGGATGCATGATTCAGCTGTTTT | |
| TTTTCTGTGTTTGTGTTATTTCTGAATGCTACATGCTGGCAGCCATGGCGTGCGATCGCTAC | |
| GTGGCCATCTGCAGCCCACTGCTCTACAGGGTGATCATGTCCCCTAGGGTCTGTTCTCTGG | |
| TGGTGGCTGCTGTCTTCTCAGTAGGTTTCACTGATGCTGTGATCCATGGAGGTTGTATACT | |
| CAGGTTGTCTTTCTGTGGATCAAACATCATTAAAGATTATTTCTGTGACATTGTCGCTCTTA | |
| TTAAACTCTCCTGCTCCAGCACTTATATTGATGAGCTTTTGATTTTTGTCATTGGTGGATTT | |
| AACATGGTGGCCACAAGCCTAACAATCATTATTTCATATGCTTTTTATCCTCACCAGCATCCT | |
| GCGCATCCACTCTAAAAAGGGCAGGTGCAAAGCGTTTAGCACCTGTAGCTCCCACCTGACA | |
| GCTGTTCTTATGTTTTATGGGTCTCTGATGTCCATGTATCTCAAACCTGCTTCTAGCAGTTC | |
| ACTCACCCAGGAGAAAGTATCCTGAGTATTTTATACCACTGTGATTCTCATGTTGAATCCC | |
| TTGATATATAGTCTGAGGAACAATGAAGTAAGTGCTCTGATGAAACTTTTAAGAAGA | |
| AAAATATCTTTATCTCCAGGATAA | |
| AOLFR40 sequences: | |
| MSNATLLTAFILTGLPHAPGLDAPLFGIFLVVYVLTVLGNLLILLVIRVDSHLHTPMYYFLTNLS | (SEQ ID NO: 75) |
| FIDMWFSTVTVPKMLMTLVSPSGRTISFHSCVAQLYFFHFLGSTECFLYTVMSYDRYLAISYPL | |
| RYTNMMTGRSCALLATGTWLSGSLHSAVQTILTFHLPYCGPNQIQHYFCDAPPILKIACADTS | |
| ANEMVIFVNIGLVASGCFVLIVLSYVSIVCSILRIRTSEGRHRAFQTCASHCIVVLCFFGPGLFIYL | |
| RPGSRDALHGVVAVFYTTLTPLFNPVVYTLRNKEVKKALLKIKNGSVFAQGE | |
| ATGTCCAACGCCACCCTACTGACAGCGTTCATCCTCACGGGCCTTCCCCATGCCCCAGGGC | (SEQ ID NO: 76) |
| TGGACGCCCCCCTCTTTGGAATCTTCCTGGTGGTTTACGTGCTCACTGTGCTGGGGAACCT | |
| CCTCATCCTGCTGGTGATCAGGGTGGATTCTCACCTCCACACCCCCATGTACTACTTCCTCA | |
| CCAACCTGTCCTTCATTGACATGTGGTTCTCCACTGTGACGGTGCCCAAAATGCTGATGAC | |
| CTTGGTGTCCCCAAGCGGCAGGACTATCTCCTTCCACAGCTGCGTGGCTCAGCTCTATTTTT | |
| TCCACTTCCTGGGGAGCACCGAGTGTTTCCTCTACACAGTCATGTCCTATGATCGCTACCT | |
| GGCCATCAGTTACCCGCTCAGQTACACCAACATGATGACTGGGCGCTCGTGTGCCCTCCTG | |
| GCCACCGGCACTTGGCTCAGTGGCTCTCTGCACTCTGCTGTCCAGACCATATTGACTTTCC | |
| ATTTGCCCTACTGTGGACCCAACCAGATCCAGCACTACTTCTGTGACGCACCGCCCATCCT | |
| GAAACTGGCCTGTGCAGACACCTCAGCCAACGAGATGGTCATCTTTGTGAATATTGGGCTA | |
| GTGGCCTCGGGCTGCTTTGTCCTGATAGTGCTGTCCTATGTGTCCATCGTCTGTTCCATCCT | |
| GCGGATCCGCACCTCAGAGGGGAGGCACAGAGCCTTTCAGACCTGTGCCTCCCACTGTATC | |
| GTGGTCCTTTGCTTCTTTGGCCCTGGTCTTTTCATTTACCTGAGGCCAGGCTCCAGGGACGC | |
| CTTGCATGGGGTTGTGGCCGTTTTCTACACCACGCTGACTCCTCTTTTCAACCCTGTTGTGT | |
| ACACCCTGAGAAACAAGGAGGTAAAGAAAGCTCTGTTGAAGCTGAAAAATGGGTCAGTAT | |
| TTGCTCAGGGTGAATAG | |
| AOLFR41 sequences: | |
| MNPENWTQVTSFVLLGFPSSHLIQFLVFLGLMVTYIVTATGKLLIIVLSWIDQRLHIQMYFFLRN | (SEQ ID NO: 77) |
| FSFLELLLVTVVVPKMLVVILTGDHTISFVSCIIQSYLYFFLGTTDFFLLAVMSLDRYLAICRPLR | |
| YETLMNGHVCSQLVLASWLAGFLWVLCPTVLMASLPFCGPNGIDHFFRDSWPLLRISCGDTH | |
| LLKLVAFMLSTLVLLGSLALTSVSYACILATVLRAPTAAERRKAFSTCASHLTVVVIIYGSSIFLY | |
| IRMSEAQSKLLNKGASVLSCIITPLLNPFIFTLRNDKVQQALREALGWPRLTAVMKLRVTSQRK | |
| ATGAACCCTGAAAACTGGACTCAGGTAACAAGCTTTGTCCTTCTGGGTTTCCCCAGTAGCC | (SEQ ID NO: 78) |
| ACCTCATACAGTTCCTGGTGTTCCTGGGGTTAATGGTGACCTACATTGTAACAGCCACAGG | |
| CAAGCTGCTAATTATTGTGCTCAGCTGGATAGACCAACGCCTGCACATACAGATGTACTTC | |
| TTCCTGCGGAATTTCTCCTTCCTGGAGCTGTTGCTGGTAACTGTTGTGGTTCCCAAGATGCT | |
| TGTCGTCATCCTCACGGGGGATCACACCATCTCATTTGTCAGCTGCATCATCCAGTCCTACC | |
| TCTACTTCTTTCTAGGCACCACTGACTTCTTCCTCTTGGCCGTCATGTCTCTGGATCGTTAC | |
| CTGGCAATCTGCCGACCACTCCGCTATGAGACCCTGATGAATGGCCATGTCTGTTCCCAAC | |
| TAGTGCTGGCCTCCTGGCTAGCTGGATTCCTCTGGGTCCTTTGCCCCACTGTCCTCATGGCC | |
| AGCCTGCCTTTCTGTGGCCCCAATGGTATTGACCACTTCTTTCGTGACAGTTGGCCCTTGCT | |
| CAGGCTTTCTTGTGGGGACACCCACCTGCTGAAACTGGTGGCTTTCATGCTCTCTACGTTG | |
| GTGTTACTGGGCTCACTGGCTCTGACCTCAGTTTGCTATGGCTGCATTCTTGCCACTGTTCT | |
| CAGGGCCCCTACAGCTGCTGAGCGAAGGAAAGCGTTTTCCACTTGCGCCTCGCATCTTACA | |
| GTGGTGGTCATCATCTATGGCAGTTCCATCTTTCTCTACATTCGTATGTCAGAGGCTCAGTC | |
| CAAACTGCTCAACAAAGGTGCCTCCGTCCTGAGCTGCATCATCACACCCCTGTTGAACCCA | |
| TTCATCTTCACTCTCCGCAATGACAAGGTGCAGCAAGCACTGAGAGAAGCCTTGGGGTGGC | |
| CCAGGCTCACTGCTGTGATGAAACTGAGGGTCACAAGTCAAAGGAAATGA | |
| AOLFR42 sequences: | |
| MNPANHSQVAGFVLLGLSQVWELRFVFFTVFSAVYFMTVVGNLLIVVIVTSDPHLHTTMYFLL | (SEQ ID NO: 79) |
| GNLSFLDFCYSSITAPRMLVDLLSGNPTISFGGCLTQLFFFHFIGGIKIFLLTVMAYDRYIAISQPL | |
| HYTLIMNQTVCALLMAASWVGGFIHSIVQIALTIQLPFGGPDKLDNFYCDVPQLIKLACTDTFV | |
| LELLMVSNNGLVTLMCFLVLLGSYTALLVMLRSHSREGRSKALSTCASHIAVVTLIFVPCIYVY | |
| TRPFRTFPMDKAVSVLYTIVTPMLNPAIYTLRNKEVIMAMKKLWRRKKDPIGPLEHRPLH | |
| ATGAATCCAGCAAATCATTCCCAGGTGGCAGGATTTGTTCTACTGGGGCTCTCTCAGGTTT | (SEQ ID NO: 80) |
| GGGAGCTTCGGTTTGTTTTCTTCACTGTTTTCTCTGCTGTGTATTTTATGACTGTAGTGGGA | |
| AACCTTCTTATTGTGGTCATAGTGACCTCCGACCCACACCTGCACACAACCATGTATTTTCT | |
| CTTGGGCAATCTTTCTTTCCTGGACTTTTGCTACTCTTCCATCACAGCACCTAGGATGCTGG | |
| TTGACTTGCTCTCAGGCAACCCTACCATTTGCTTTGGTGGATGCCTGACTCAACTCTTCTTC | |
| TTCCACTTCATTGGAGGCATCAAGATCTTCCTGCTGACTGTCATGGCGTATGACCGGTACA | |
| TTGCCATTTCCCAGCCCCTGCACTACACGCTCATTATGAATCAGACTGTCTGTGCACTCCTT | |
| ATGGGAGCCTCCTGGGTGGGGGGCTTCATCCACTCCATAGTACAGATT7GCATTGACTATCC | |
| AGCTGCCATTCTGTGGGCCTGACAAGCTGGACAACTTTTATTGTGATGTGCCTCAGCTGAT | |
| CAAATTGGCGTGCACAGATACCTTTGTCTTAGAGCTTTTAATGGTGTCTAACAATGGCCTG | |
| GTGACCCTGATGTGTTTTCTGGTGCTTCTGGGATCGTACACAGCACTGCTAGTCATGCfCC | |
| GAAGCCACTCACGGGAGGGCCGCAGCAAGGCCCTGTCTACCTGTGCCTCTCACATTGCTGT | |
| GGTGAGCTTAATCTTTGTGCCTTGCATCTACGTCTATACAAGGCCTTTTCGGACATTCCCCA | |
| TGGACAAGGCCGTCTCTGTGCTATACACAATTGTCACCCCCATGCTGAATCCTGCCATCTA | |
| TACCCTGAGAAACAAGGAAGTGATCATGGCCATGAAGAAGCTGTGGAGGAGGAAAAAGG | |
| ACCCTATTGGTCCCCTGGAGCACAGACCCTTACATTAG | |
| AOLFR43 sequences: | |
| MQKPQLLVPIIATSNGNLVHAAYFLLVGIPGLGPTIHFWLAFPLCFMYALATLGNLTIVLIIRVE | (SEQ ID NO: 81) |
| RRLHEPMYLFLAMLSTIDLVLSSITMPKMASLFLMGIQEIEFNICLAQMFLIHALSAVESAVLLA | |
| MAFDRFVAICHPLRHASVLTGCTVAKIGLSALTRGFVFFFPLPFILKWLSYCQTHTVTHSFCLHQ | |
| DIMKLSCTDTRVNVVYGLFIILSVMGVDSLFIGFSYILILWAVLELSSRRAALKAFNTCISHLCAV | |
| LVFYVPLIGLSVVHRIGGPTSLLHVVMANTYLLLPPVVNPLVYGAKTKEICSRVLCMFSQGGK | |
| ATGCAGAAGCCCCAGCTCTTGGTCCCTATCATAGCCACTTCAAATGGAAATCTGGTCCACG | (SEQ ID NO: 82) |
| CAGCATACTTCCTTTTGGTGGGTATCCCTGGCCTGGGGCCTACCATACACTTTTGGCTGGCT | |
| TTCCCACTGTGTTTTATGTATGCCTTGGCCACCCTGGGTAACCTGACCATTGTCCTCATCAT | |
| TCGTGTGGAGAGGCGACTGCATGAGCCCATGTAGCTCTTCCTGGCCATGCTTTCCACTATT | |
| GACCTAGTCCTCTCCTCTATCACCATGCCCAAGATGGCCAGTCTTTTCCTGATGGGCATCCA | |
| GGAGATCGAGTTCAACATTTGCCTGGCCCAGATGTTCCTTATCCATGCTCTGTCAGCCGTG | |
| GAGTCAGCTGTCCTGCTGGCCATGGCTTTTGACCGGTTTGTGGCCATTTGCCACCCATTGC | |
| GCCATGCTTCTGTGCTGACAGGGTGTACTGTGGCCAAGATTGGACTATCTGCCCTGACCAG | |
| GGGGTTTGTATTCTTCTTCCCACTGCCCTTCATCCTCAAGTGGTTGTCCTACTGCCAAACAC | |
| ATACTGTCACACACTCCTTCTGTCTGCACCAAGATATTATGAAGCTGTCCTGTACTGACAC | |
| CAGGGTCAATGTGGTTTATGGACTCTTCATCATCCTCTCAGTCATGGGTGTGGACTCTCTCT | |
| TCATTGGCTTCTCATATATCCTCATCCTGTGGGCTGTTTTGGAGGTGTCCTCTCGGAGGGCA | |
| GCACTCAAGGCTTTCAACACCTGCATCTCCCACCTCTGTGCTGTTCTGGTCTTCTATGTACC | |
| CCTCATTGGGCTCTCGGTGGTGCATAGGCTGGGTGGTCCCACGTCCCTCCTCCATGTGGTT | |
| ATGGCTAATACCTACTTGCTGCTACCACCTGTAGTCAACGCCCTTGTCTATGGAGCCAAGA | |
| CCAAAGAGATCTGTTCAAGGGTCCTCTGTATGTTCTCACAAGGTGGCAAGTGA | |
| AOLFR44 sequences: | |
| MSSCNFTHATFVLIGIPGLEKAHFWVGFPLLSMYVVAMFGNCIVVFIVRTERSLHAPMYLFLC | (SEQ ID NO: 83) |
| MLAAIDLALSTSTMPKILALFWFDSREISFEACLTQMFFIHALSAIESTILLAMAFDRYVAICHPL | |
| RHAAVLNNTVTAQIGIVAVVRGSLFFFPLPLLIKRLAFCHSNVLSHSYCVHQDVMKLAYADTLP | |
| NVVYGLTAILLVMGVDVMFISLSYFLIIRTVLQLPSKSERAKAFGTCVSHIGVVLAFYVPLIGLS | |
| VVHRFGNSLHPIVRVVMGDIYLLLPPVTNPIIYGAKTKQIRTRVLAMFKISCDKDLQAVGGK | |
| ATGAGTTCCTGCAACTTCACACATGCCACCTTTGTGCTTATTGGTATCCCAGGATTAGAGA | (SEQ ID NO: 84) |
| AAGCCCATTTCTGGGTTGGCTTCCCCCTCCTTTCCATGTATGTAGTGGCAATGTTTGGAAAC | |
| TGCATCGTGGTCTTCATCGTAAGGACGGAACGCAGCCTGCACGCTCCGATGTACCTCTTTC | |
| TCTGCATGCTTGCAGCCATTGACCTGGCGTTATCCACATCCACCATGCCTAAGATCCTTGCC | |
| CTTTTCTGGTTTGATTCCCGAGAGATTAGCTTTGAGGCCTGTCTTACCCAGATGTTCTTTAT | |
| TCATGCCCTCTCAGCCATTGAATCCACCATCCTGCTGGCCATGGCCTTTGACCGTTATGTGG | |
| CCATCTGCCACCCACTGCGCCATGCTGCAGTGCTCAACAATACAGTAACAGCCCAGATTGG | |
| CATCGTGGGTGTGGTCCGCGGATCCCTCTTTTTTTTCCCACTGCCTCTGCTGATCAAGCGGC | |
| TGGCCTTCTGCCACTCCAATGTCCTCTCGCACTCCTATTGTGTCCACCAGGATGTAATGAA | |
| GTTGGCCTATGCAGACACTTTGCCCAATGTGGTATATGGTCTTACTGCCATTCTGCTGGTC | |
| ATGGGCGTGGACGTAATGTTCATCTCCTTGTCCTATTTTCTGATAATACGAACGGTTCTGC | |
| AACTGCCTTCCAAGTCAGAGCGGGCCAAGGCCTTTGGAACGTGTGTGTCACACATTGGTGT | |
| GGTACTCGCCTTCTATGTGCCACTTATTGGCCTCTCAGTGGTACACCGCTTTGGAAACAGC | |
| CTTCATCCCATTGTGCGTGTTGTCATGGGTGACATCTACCTGCTGCTGCCTCCTGTCATCAA | |
| TCCCATCATCTATGGTGCCAAAACCAAAGAGATCAGAACACGGGTGCTGGCTATGTTCAAG | |
| ATGAGCTGTGACAAGGACTTGCAGGCTGTGGGAGGCAAGTGA | |
| AOLFR45 sequences: | |
| MLPSNITSTHPAVFLLVGIPGLEHLHAWISIPFCFAYTLALLGNCTLLFIIQADAALHEPMYLFLA | (SEQ ID NO: 85) |
| MLATIDLVLSSTTLPKMLAIFWFRDQEINFFACLVQMFFLHSFSIMESAVLLAMAFDRYVAICKP | |
| LHYTTVLTGSLITKIGMAAVARAVTLMTPLPFLLRRFHYCRGPVIAHCYCEHMAVVRLACGDT | |
| SFNNIYGIAVAMFSVVLDLLFVILSYVFILQAVLQLASQEARYKAFGTCVSHIGAILSTYTPVVIS | |
| SVMHRVARHAAPRVHILLAIFYLLFPPMVNPIIYGVKTKQIREYVLSLFQRKNM | |
| TGGAAACAAGAGGTAATCTTTGCAGGTGGGATAGCACAGGTTGAACTCTAATCATATATA | (SEQ ID NO: 86) |
| CTGTAGAAGGTATATATAGAAGGTGAAGAAGCCCTGTAAAAATTGACAAGGAGATTTCCA | |
| GGAGCCATGCTTCCCTCTAATATCAGCTCAACACATCCAGCTGTCTTTTTGTTGGTAGGAAT | |
| TCCTGGTTTGGAACACCTGCATGCCTGGATCTCCATCCCCTTCTGCTTTGCTTATACTCTGG | |
| CGCTGCTAGGCAACTGTACCCTTCTCTTCATTATCCAGGCTGATGCAGCCCTCCATGAACCC | |
| ATGTACCTCTTTCTGGCCATGTTGGCAACCATTGACTTGGTTCTTTCTTCTACAACGCTGCC | |
| CAAAATGCTTGCCATATTCTGGTTCAGGGATCAGGAGATCAACTTCTTTGCCTGTCTGGTC | |
| CAGATGTTCTTCCTTCACTCCTTCTCCATCATGGAGTCAGCAGTGCTGCTGGCCATGGGCTT | |
| TGACCGCTATGTGGCCATCTGCAAGCGATTGCACTACACGACGGTCCTGACTGGGTCCCTC | |
| ATCACCAAGATTGGCATGGCTGCTGTGGCCCGGGCTGTGACACTAATGACTCCACTCCGCT | |
| TCCTGCTCAGACGCTTCCACTACTGCCGAGGCCCAGTGATTGCCCATTGCTACTGTGAACA | |
| CATGGCTGTGGTAAGGCTGGCGTGTGGGGACACTAGCTTCAACAATATCTATGGCATTGCT | |
| GTGGCCATGTTTAGTGTGGTGTTGGACCTGCTCTTTGTTATCCTGTCTTATGTCTTCATCCT | |
| TCAGGCAGTTCTCGAGCTTGCCTCTCAGGAGGCCCGCTACAAAGCATTTGGGACATGTGTG | |
| TCTCACATAGGTGCCATCCTGTCCACCTACACTCCAGTAGTCATCTCTTCAGTCATGCACCG | |
| TGTAGCCCGCCATGCTGCCCCTCGTGTCCACATAGTCCTTGCTATTTTCTATCTCCTTTTCC | |
| CACCCATGGTCAATCCTATCATATATGGAGTCAAGACCAAGCAGATTCGTGAGTATGTGCT | |
| CAGTGTATTCCAGAGAAAGAACATGTAGATGGATAGTTCTCTTTTTTTATCCCACTTGCCA | |
| AGTAATGAGAATGGTGGATTGGGGTTGAGGGGAAAAATCTAAATAGGAAAATTGCAGAGT | |
| ATCTTTGACAATTGTCTAGTATGATAAGGAAAATGAGGTTTCATTCCTCACAGATCTACGA | |
| GTCAGGTCAAACCAGGAGTGCACCTATAGTGTGGTCTGATAGTAGAGGTTTGACCTTCCCA | |
| TTGTCATAGACTCATCACATGGCTAAGGAAGACAAACCTCTCAAAGTGGTATTGTAATCTG | |
| GGTGAAAGACAGTAGGACCTTTATTGGCTGAGATTGGCCCAAACAGCTGAGTC | |
| AOLFR46 sequences: | |
| MNIKHCGWHMIHTWLNIREDDDSDFKNFIGQIQGLSGNPHSTTSRMYFLCFCTSLLGFKVHWV | (SEQ ID NO: 87) |
| SRLIXKLYMASPNNDSTAPVSEFLLICFPNFQSWQHWLSLPLSLLFLLAMGANTTLLITIQLEAS | |
| LHQPLYYLLSLLSLLDIVLCLTVIPKVLAIFWFDLRSISFPACFLQMFIMNSFLTMESCTFMVMA | |
| YDRYVAICHPLRYPSIITDQFVARAVVFVIARNAFVSLPVPMLSARLRYCAGNIIKNCICSNLSVS | |
| KLSCDDITFNQLYQFVAGWTLLGSDLILIVISYSFILKVVLRIKAEGAVAKALSTCGSHFILILFFS | |
| TVLLVLVITNLARKRIPPDVPILLNILHHLIPPALNPIVYGVRTKEIKQGIQNLLKRL | |
| ATGAATATAAAACATTGTGGCTGGCATATGATACATACTTGGTTAAATATAAGGGAGGAT | (SEQ ID NO: 88) |
| GATGACAGTGATTTTAAAAACTTTATTGGACAGATACAGGGGCTCAGTGGAAACCCACACT | |
| CTACTACGTCTAGAATGTACTTTTTATGTTTCTGTACTTCTCTACTAGGTTTTGGTACAC | |
| TGGGTCTCCAGATTGATCANGAAACTTTACATGGCATCTCCCAACAATGACTCCACTGCCC | |
| CAGTCTCTGAATTCCTCCTCATCTGCTTCCCCAACTTCCAGAGCTGGCAGCACTGGTTGTCT | |
| CTGCCCCTCAGCCTTCTCTTCCTCCTGGCCATGGGAGCTAACACCACCCTCCTGATCACCAT | |
| CCAGCTGGAGGCCTCTCTGCACCAGCCCCTGTACTAGCTGCTCAGCCTCCTCTCCCTGCTGG | |
| ACATCGTGCTCTGCCTCACCGTCATCCCCAAGGTCCTGGCCATGTTCTGGTTTGACCTCAGG | |
| TCGATCAGCTTCCCAGCCTGCTTCCTCCAGATGTTCATCATGAACAGTTTTTTGACCATGGA | |
| GTCCTGCACGTTCATGGTCATGGGCTATGACCGTTATGTGGCCATCTGCCATCCATTGAGA | |
| TACCCGTCTATCATCACTGACCAGTTTGTGGCTAGGGCCGTGGTCTTTGTTATAGCCCGGA | |
| ATGCCTTTGTTTCTCTTCCTGTTCCCATGCTTTCTGCCAGGCTCAGATACTGTGCAGGAAAC | |
| ATAATGAAGAACTGGATCTGCAGTAACCTGTCTGTGTCCAAACTCTCTTGTGATGACATCA | |
| CTTTCAATCAGCTCTACCAGTTTGTGGCAGGCTGGACTCTGTTGGGCTCTGATCTTATCCTT | |
| ATTGTTATCTCCTATTCTTTTATATTGAAAGTTGTGCTTAGGATCAAGGCCGAGGGTGCTGT | |
| GGCCAAGGCCTTGAGCACGTGTGGTTCCCACTTCATCCTCATCCTCTTCTTCAGCACAGTCC | |
| TGCTGGTTCTGGTCATCACTAACCTGGCCAGGAAGAGAATTCCTCCAGATGTCCCCATCCT | |
| GCTCAACATCCTGCACCACCTCATTCCCCCAGCTCTGAACCCCATTGTTTATGGTGTGAGA | |
| ACCAAGGAGATCAAGCAGGGAATCCAAAACCTGCTGAAGAGGTTGTAA | |
| AOLFR47 sequences: | |
| MSASNITLTHPTAFLLVGIPGLEHLHIWISIPFCLAYTLALLGNCTLLLIIQADAALHEPMYLFLA | (SEQ ID NO: 89) |
| MLAAIDLVLSSSALPKMLAIFWFRDREINFFACLAQMFFLHSFSIMESAVLLAMAFDRYVAICK | |
| PLHYTKVLTGSLITKIGMAAVARAVTLMTPLPFLLRCFHYCRGPVIAHCYCEHMAVVRLACGD | |
| TSFNNIYGIAVAMFIVVLDLLLVILSYIFILQAVLLLASQEARYKAFGTCVSHIGAILAFYTTVVIS | |
| SVMHRVARHAAPHVHILLANFYLLFPPMVNPIIYGVKTKQIRESILGVFPRKDM | |
| ATGTCAGCCTCCAATATCACCTTAACACATCCAACTGCCTTCTTGTTGGTGGGGATTCCAG | (SEQ ID NO: 90) |
| GCCTGGAACACCTGCACATCTGGATCTCCATCCCTTTCTGCTTAGCATATACACTGGCGCTG | |
| CTTGGAAACTGCACTCTCCTTCTCATCATCCAGGCTGATGCAGCCCTCCATGAACCCATGT | |
| ACCTCTTTCTGGCCATGTTGGCAGCCATCGACCTGGTCCTTTCCTCCTCAGCACTGCCCAAA | |
| ATGCTTGCCATATTCTGGTTCAGGGATCGGGAGATAAACTTCTTTGCCTGTCTGGCCCAGA | |
| TGTTCTTCCTTCACTCCTTCTCCATCATGGAGTCAGCAGTGCTGCTGGCCATGGCCTTTGAC | |
| CGCTATGTGGCTATCTGCAAGCCACTGCACTACACCAAGGTCCTGACTGGGTCCGTCATCA | |
| CCAAGATTGGCATGGCTGCTGTGGCCCGGGCTGTGACACTAATGACTCCACTCCCCTTCCT | |
| GCTGAGATGTTTCCACTACTGGCGAGGCCCAGTGATCGCTCACTGCTACTGTGAACACATG | |
| GCTGTGGTGAGGCTGGCGTGTGGGGACACTAGCTTCAACAATATCTATGGCATCGCTGTGG | |
| CCATGTTTATTGTGGTGTTGGACCTGCTCCTTGTTATCCTGTCTTATATCTTTATTCTTCAG | |
| GCAGTTCTACTGCTTGCCTCTCAGGAGGCCCGGTACAAGGCATTTGGGACATGTGTCTCTC | |
| ATATAGGTGCCATCTTAGCCTTCTACACAACTGTGGTCATCTCTTCAGTCATGCACCGTGTA | |
| GCCCGCCATGCTGCCCCTCATGTCCACATCCTCCTTGCCAATTTCTATCTGCTCTTCCCACC | |
| CATGGTCAATCCCATAATCTATGGTGTCAAGACCAAGCAAATCCGTGAGAGCATCTTGGGA | |
| GTATTCCCAAGAAAGGATATGTAG | |
| AOLFR48 sequences: | |
| MMVDPNGNESSATYFILIGLPGLEEAQFWLAFPLCSLYLIAVLGNLTIIYIVRTEHSLHEPMYIFL | (SEQ ID NO: 91) |
| CMLSGIDILISTSSMPKMLAIFWFNSTTIQFDACLLQMFAIHSLSGMESTVLLAMAFDRYVAICH | |
| PLRHATVLTLPRVTKIGVAAVVRGAALMAPLPVFIKQLPFCRSNILSHSYCLHQDVMKLACDDI | |
| RVNVVYGLIVIISAIGLDSLLISFSYLLILKTVLGLTREAQAKAFGTCVSHVCAVFIFYVPFIGLSM | |
| VHRFSKRRDSPLPVILANIYLLVPPVLNPIVYGVKTKEIRQRILRLFHVATHASEP | |
| ATGATGGTGGATCCCAATGGCAATGAATCCAGTGCTACATACTTCATCCTAATAGGCCTCC | (SEQ ID NO: 92) |
| CTGGTTTAGAAGAGGCTCAGTTCTGGTTGGCCTTCCCATTGTGCTCCCTCTACCTTATTGCT | |
| GTGCTAGGTAACTTGACAATCATGTACATTGTGCGGACTGAGCACAGCCTGCATGAGCCCA | |
| TGTATATATTTCTTTGCATGCTTTCAGGCATTGACATCCTCATCTCCACCTCATCCATGCCC | |
| AAAATGCTGGCCATCTTCTGGTTCAATTCCACTACCATCCAGTTTGATGCTTGTCTGCTACA | |
| GATGTTTGCCATCCACTCCTTATCTGGCATGGAATCCACAGTGCTGCTGGGCATGGCTTTT | |
| GACCGCTATGTGGCCATCTGTCACCCACTGCGCGATGCCACAGTACTTACGTTGCCTCGTG | |
| TCACCAAAATTGGTGTGGCTGCTGTGGTGCGGGGGGCTGCACTGATGGCACCCCTTCCTGT | |
| CTTCATCAAGCAGCTGCCCTTCTGCCGCTCCAATATCCTTTCCCATTCCTACTGCCTACACC | |
| AAGATGTCATGAAGCTGGCCTGTGATGATATCCGGGTCAATGTCGTCTATGGCCTTATCGT | |
| CATCATCTCCGCCATTGGCCTGGACTCACTTGTCATCTCCTTCTCATATCTGCTTATTCTTA | |
| AGACTGTGTTGGGCTTGACACGTGAAGCCCAGGCCAAGGCATTTGGCACTTGGGTCTCTCA | |
| TGTGTGTGCTGTGTTCATATTCTATGTACCTTTCATTGGATTGTCCATGGTGCATCGCTTTA | |
| GCAAGCGGCGTGACTCTCCGCTGCCCGTCATCTTGGCCAATATCTATCTGCTGGTTCCTCCT | |
| GTGCTCAACCCAATTGTCTATGGAGTGAAGACAAAGGAGATTCGACAGCGCATCCTTCGA | |
| CTTTTCCATGTGGCCACACACGCTTCAGAGCCCTAG | |
| AOLFR49 sequences: | |
| MLTFHNVCSVPSSFWLTGIPGLESLHVWLSIPFGSMYLVAVVGNVTILAVVKAERSLHQPMYFF | (SEQ ID NO: 93) |
| LCMLAAIDLVLSTSTIPKLLGIFWFGACDIGLDACLGQMFLIHCFATVESGIFLAMAFDRYVAIC | |
| NPLRHSMVLTYTVVGRLGLVSLLRGVLYIGPLPLMIRLRLPLYKTHVISHSYCEHMAVVALTC | |
| GDSRVNNVYGLSIGFLVLILDSVAIAASYVMIFRAVMGLATPEARLKTLGTCASHLCAILIFYVP | |
| IAVSSLIHRFGQCVPPPVHTLLANFYLLIPPILNPIVYAVRTKQIRESLLQIPRIEMKIR | |
| ATGCTCACTTTTCATAATGTCTGCTCAGTACCCAGCTCCTTCTGGCTCACTGGCATCCCAGG | (SEQ ID NO: 94) |
| GCTGGAGTCCCTACACGTCTGGCTCTCCATCCCCTTTGGCTCCATGTACCTGGTGGCTGTG | |
| GTGGGGAATGTGACCATCCTGGCTGTGGTAAAGATAGAAGGCAGCCTGCACCAGCCGATG | |
| TACTTTTTCTTGTGCATGTTGGCTGCCATTGACCTGGTTCTGTCTACTTCCACTATACCCAA | |
| ACTTCTGGGAATCTTCTGGTTCGGTGCTTGTGACATTGGCCTGGACGCCTGCTTGGGCCAA | |
| ATGTTCCTTATCCACTGCTTTGCCACTGTTGAGTCAGGCATCTTCCTTGCCATGGCTTTTGA | |
| TCGCTACGTGGCCATCTGCAACCCACTACGTCATAGCATGGTGCTCACTTATACAGTGGTG | |
| GGTCGTTTGGGGCTTGTTTCTCTCCTCCGGGGTGTTCTCTACATTGGACCTCTGCCTCTGAT | |
| GATCCGCCTGCGGCTGCCCCTTTATAAAACCCATGTTATCTCCCACTCCTACTGTGAGCAC | |
| ATGGCTGTAGTTGCCTTGACATGTGGCGACAGCAGGGTCAATAATGTCTATGGGCTGAGC | |
| ATCGGCTTTCTGGTGTTGATCCTGGACTCAGTGGCTATTGCTGCATCCTATGTGATGATTTT | |
| CAGGGCCGTGATGGGGTTAGCCACTCCTGAGGCTAGGCTTAAAACCCTGGGGACATGCGC | |
| TTCTCACCTCTGTGCGATGCTGATCTTTTATGTTCCCATTGCTGTTTCTTCCCTGATTCACCG | |
| ATTTGGTCAGTGTGTGCCTCCTCCAGTCCACACTCTGGTGGCCAACTTCTATCTCCTCATTC | |
| CTCCAATCCTCAATCCCATTGTCTATGCTGTTCGCACCAAGCAGATGCGAGAGAGCCTTCT | |
| CCAAATACCAAGGATAGAAATGAAGATTAGATGA | |
| AOLFR50 sequences: | |
| MNLDSFFSFLLKSLIMALSNSSWRLPQPSFFLVGIPGLEESQHWIALPLGILYLLALVGNVTILFII | (SEQ ID NO: 95) |
| WMDPSLHQSMYLFLSMLAAIDLVVASSTAPKALAVLLVRAQEIGYTVCLIQMFFTHAFSSMES | |
| GVLVAMALDRYVAICHPLHHSTILHPGVIGHIGMVVLVRGLLLLIPFLILLRKLIFGQATIIGHAY | |
| CEHMAVVKLACSETTVNRAYGLTVALLVVGLDVLAIGVSYAHILQAVLKVPGNEARLKAFST | |
| CGSHVCVILVFYIPGMFSFLTHRFGHHVPHHVHVLLAILYRLVPPALNPLVYRVKTQKIHQ | |
| ATGAATTTGGATTCTTTTTTCTCTTTCCTCCTCAAGTCATTGATAATGGCACTTAGCAATTC | (SEQ ID NO: 96) |
| CAGCTGGAGGCTACCCCAGCCTTCTTTTTTCGTGGTAGGAATTCCGGGTTTAGAGGAAAGC | |
| CAGCACTGGATGGCAGTGCCCCTGGGCATCCTTTACCTCCTTGGTCTAGTGGGCAATGTTA | |
| CCATTCTCTTCATCATCTGGATGGACCCATCCTTGCACCAATCTATGTACCTCTTCCTGTCC | |
| ATGCTAGCTGCCATCGACCTGGTTGTGGCCTCCTCCACTGCACCCAAAGCCCTTGCAGTGC | |
| TCCTGGTTCGTGCCCAAGAGATTGGTTACACTGTCTGCCTGATCCAGATGTTCTTCACCCAT | |
| GCATTCTCCTCCATGGAGTCAGGGGTACTTGTGGCCATGGCTCTGGATCGCTATGTAGCCA | |
| TTTGTCACCCCTTGCACCATTCCACAATCCTGCATCCAGGGGTCATAGGGCACATCGGAAT | |
| GGTGGTGCTGGTGCGGGGATTACTACTCCTCATCCCCTTCCTCATTCTGTTGCGAAAACTT | |
| ATCTTCTGCCAAGCCACCATCATAGGCCATGCCTATTGTGAACATATGGCTGTTGTGAAAC | |
| TTGCCTGCTCAGAAACCACAGTCAATCGAGCTTATGGGCTGACTGTGGCCTTGCTTGTGGT | |
| TGGGCTGGATGTCCTGGCCATTGGTGTTTCCTATGCCCACATTCTCCAGGCAGTGCTGAAG | |
| GTACCAGGAAATGAGGCCCGACTTAAGGCCTTTAGCACATGTGGCTCTCATGTTTGTGTCA | |
| TCCTGGTCTTCTATATCCCGGGAATGTTCTCCTTCCTCACTCACCGCTTTGGTCATCATGTA | |
| CCCCATCACGTCCATGTTCTTCTGGCCATACTGTATCGCGTTGTGCCACCTGCACTCAATCC | |
| TCTTGTCTATAGGGTGAAGACCCAGAAGATCCACCAGTGA | |
| AOLFR51 sequences: | |
| MCQQILRDCILLIHHLCINRKKVSLVMLGPAYNHTMETPASFLLVGIPGLQSSHLWLAISLSAM | (SEQ ID NO: 97) |
| YIIALLGNTHVTAIWMDSTRHEPMYCFLCVLAAVDIVMASSVVPKMVSIFCSGDSSISFSACFTQ | |
| MFFVHLATAVETGLLLTMAFDRYVAICKPLHYKRILTPQVMLGMSMAITIRAIIAITPLSWMVS | |
| HLPFCGSNVVVHSYCEHIALARLACADPVPSSLYSLIGSSLMVGSDVAFIAASYILILKAVFGLSS | |
| KTAQLKALSTCGSHVGVMALYYLPGMASIYAAWLGQDVVPLHTQVLLADLYVIIPATLNPIIY | |
| GMRTKQLRERIWSYLMHVLFDHSNLGS | |
| ATGTGTCAACAAATCTTACGGGATTGCATTCTTCTCATACATCATTTGTGCATTAACAGGA | (SEQ ID NO: 98) |
| AAAAAGTCTCACTTGTGATGCTGGGTCCAGCTTATAACCACACAATGGAAACCCCTGCCTC | |
| CTTCCTCCTTGTGGGTATCCCAGGACTGCAATCTTCACATCTTTGGCTGGCTATCTCAGTGA | |
| GTGCCATGTACATCATAGCCCTGTTAGGAAACACCATCATCGTGACTGCAATCTGGATGGA | |
| TTCCACTCGGCATGAGCCCATGTATTGCTTTCTGTGTGTTCTGGCTGCTGTGGACATTGTTA | |
| TGGCCTCCTCGGTGGTACCCAAGATGGTGAGCATCTTCTGCTCAGGAGACAGCTCAATCAG | |
| CTTTAGTGCTTGTTTCACTCAGATGTTTTTTGTCCACTTAGCCACAGCTGTGGAGACGGGG | |
| CTGCTGCTGACCATGGCTTTTGACCGCTATGTAGCCATCTGCAAGCCTCTACACTACAAGA | |
| GAATTCTCACGCCTCAAGTGATGCTGGGAATGAGTATGGCCATCACCATCAGAGCTATCAT | |
| AGCCATAACTCCACTGAGTTGGATGGTGAGTCATCTACCTTTCTGTGGCTCCAATGTGGTT | |
| GTCCACTCCTAGTGTGAGGAGATAGCTTTGGCCAGGTTAGCATGTGCTGACCCCGTGCCCA | |
| GCAGTCTCTACAGTCTGATTGGTTCCTCTCTTATGGTGGGCTCTGATGTGGCCTTCATTGCT | |
| GCCTCCTATATCTTAATTCTCAAGGCAGTATTTGGTCTCTCCTCAAAGACTGCTCAGTTGAA | |
| AGCATTAAGCACATGTGGCTCCCATGTGGGGGTTATGGCTTTGTACTATCTACCTGGGATG | |
| GCATCCATCTATGCGGCCTGGTTGGGGCAGGATGTAGTGCCCTTGCACACCCAAGTCCTGC | |
| TAGCTGACCTGTACGTGATCATCCCAGCCACGTTAAATCCCATCATCTATGGCATGAGGAC | |
| CAAACAACTGCGGGAGAGAATATGGAGTTATCTGATGCATGTCCTCTTTGACCATTCCAAC | |
| CTGGGTTCATGA | |
| AOLFR52 sequences: | |
| MLGPAYNHTMETPASFLLVGIPGLQSSHLWLAISLSAMYITALLGNTLIVTAIWMDSTRHEPMY | (SEQ ID NO: 99) |
| CFLCVLAAVDIVMASSVVPKMVSIFCSGDSSISFSACFTQMFFVHLATAVETGLLLTMAFDRYV | |
| AICKPLHYKRILTPQVMLGMSMAVTIRAVTFMTPLSWMMNHLPFCGSNVVVHSYCKHIALAR | |
| LACADPVPSSLYSLIGSSLMVGSDVAFIAASYILILRAVFDLSSKTAQLKALSTCGSHVGVMALY | |
| YLPGMASIYAAWLGQDIVPLHTQVLLADLYVIIPATLNPIIYGMRTKQLLEGIWSYLMHFLFDH | |
| SNLGS | |
| ATGCTGGGTCCAGCTTACAACCACACAATGGAAACCCCTGCCTCCTTCCTCCTTGTGGGTA | (SEQ ID NO: 100) |
| TCCCAGGACTGCAATCTTCACATCTTTGGCTGGCTATGTCACTGAGTGCCATGTACATCAC | |
| AGCCCTGTTAGGAAACACCCTCATCGTGACTGCAATCTGGATGGATTCCACTCGGCATGAG | |
| CCCATGTATTGCTTTCTGTGTGTTCTGGCTGCTGTGGACATTGTTATGGCCTCCTCCGTGGT | |
| ACCCAAGATGGTGAGCATCTTCTGCTCGGGAGACAGCTCCATCAGCTTTAGTGCTTGTTTC | |
| ACTCAGATGTTTTTTGTCCACTTAGGCACAGCTGTGGAGACGGGGCTGCTGCTGACCATGG | |
| CTTTTGACCGCTATGTAGCCATCTGCAAGCCTCTACACTACAAGAGAATTCTCACGCCTCA | |
| AGTGATGCTGGGAATGAGTATGGCCGTCACCATCAGAGCTGTCACATTCATGACTCCACTG | |
| AGTTGGATGATGAATCATCTACCTTTCTGTGGCTCCAATGTGGTTGTCCACTCCTACTGTAA | |
| GCACATAGCTTTGGCCAGGTTAGCATGTGCTGACCCCGTGCCCAGCAGTCTCTACAGTCTG | |
| ATTGGTTCCTCTCTTATGGTGGGCTCTGATGTGGCCTTCATTGCTGCCTCCTATATCTTAAT | |
| TCTCAGGGCAGTATTTGATCTCTCCTCAAAGACTGCTCAGTTGAAAGCATTAAGCACATGT | |
| GGCTCCCATGTGGGGGTTATGGCTTTGTACTATCTACCTGGGATGGCATCCATCTATGCGG | |
| CCTGGTTGGGGCAGGATATAGTGCCCTTGCACACCCAAGTGCTGCTAGCTGACCTGTACGT | |
| GATCATCCCAGCCACTTTAAATCCCATCATCTATGGCATGAGGACCAAACAATTGCTGGAG | |
| GGAATATGGAGTTATCTGATGCACTTCCTCTTTGACCACTCCAACCTGGGTTCATGA | |
| AOLFR54 sequences: | |
| MSDSNLSDNHLPDTFFLTGIPGLEAAHFWIAIPFCAMYLVALVGNAALILVIAMDNALHAPMY | (SEQ ID NO: 101) |
| LFLCLLSLTDLALSSTTVPKMLAILWLHAGEISFGGCLAQMFCVHSIYALESSILLAMAFDRYVA | |
| ICNPLRYTTILNHAVIGRIGFVGLFRSVAIVSPFIFLLRRIPYCGHRVMTHTYCEHMGIARLACA | |
| NITVNIVYGLTVALLAMGLDSILIAISYGFILHAVFHLPSHDAQHKALSTCGSHIGIILVFYIPAFF | |
| SFLTHRFGHHEVPKHVHIFLANLYVLVPPVLNPILYGARTKEIRSRILKILHLGKTSI | |
| ATGTCAGATTCCAACCTCAGTGATAACCATCTTCCAGACACCTTCTTCTTAACAGGGATCG | (SEQ ID NO: 102) |
| CAGGGCTGGAGGCTGCCCACTTCTGGATTGCCATCCCTTTCTGTGCCATGTATCTTGTAGC | |
| ACTGGTTGGAAATGCTGCCCTCATCCTGGTCATTGCCATGGACAATGCTCTTCATGCACCT | |
| ATGTACCTCTTCCTCTGCCTTCTCTCACTCACAGACCTGGCTCTCAGTTCTACCACTGTGCC | |
| CAAGATGGTGGCCATTTTGTGGCTCCATGCTGGTGAGATTTCCTTTGGTGGATGCCTGGCC | |
| CAGATGTTTTGTGTCCATTCTATCTATGCTCTGGAGTCCTCGATTCTACTTGCCATGGCCTT | |
| TGATAGGTATGTGGCTATCTGTAACCCATTAAGGTATACAACCATTCTCAACCATGCTGTC | |
| ATAGGCAGAATTGGCTTTGTTGGGCTATTCCGTAGTGTGGCTATTGTCTCCCCCTTCATCTT | |
| CTTGCTGAGGCGACTCCCCTACTGTGGTCACCGTGTCATGACACACACATACTGTGAGCAT | |
| ATGGGCATCGCCCGACTGGCCTGTGCCAACATCACTGTCAATATTGTGTATGGGCTAACTG | |
| TGGCTCTGCTGGCCATGGGACTGGATTCCATTCTCATTGCCATTTCCTATGGCTTTATCCTC | |
| CATGCAGTCTTTCACCTTCCATCTCATGATGCCCAGCACAAAGCTCTGAGTACCTGTGGCT | |
| CCCAGATTGGCATCATCCTGGTTTTCTACATCCCTGCCTTCTTCTCCTTCCTCACCCACCGC | |
| TTTGGTCACCAGGAAGTCCCCAAGCATGTGCACATCTTTCTGGCTAATCTCTATGTGCTGG | |
| TGCCTCCTGTACTCAATCCTATTCTCTATGGAGGTAGAACCAAGGAGATTCGGAGTCGACT | |
| TCTAAAACTGCTTCACCTGGGGAAGACTTCAATATGA | |
| AOLFR57 sequences: | |
| MSFQVTYMFYLHWTMEKSNNSTLFILLGFSQNKNIEVLCFVLFLFCYIAIWMGNLLIMISITCTQ | (SEQ ID NO: 103) |
| LIHQPMYFFLNYLSLSDLCYTSTVTPKLMVDLLAERKTISYNNCMIQLFTTHFFGGIEIFILTGM | |
| AYDRYVAICKPLHYTIIMSRQKCNTIIIVCCTGGFIHSASQFLLTIFVPFCGPNEIDHYFCDVYPLL | |
| KLACSNIHMIGLLVIANSGLIALVTFVVLLLSYVFILYTIRAYSAERRSKALATCSSHVIVVVLFF | |
| APALFIYIRPVTTFSEDKVFALFYTIIAPMFNPLIYTLRNTEMKNAMRKVWCCQILLKRNQLF | |
| ATGTCATTTCAGGTGACTTATATGTTCTATCTACACTGGACCATGGAAAAAAGCAATAATA | (SEQ ID NO: 104) |
| GCACTTTGTTTATTCTCTTGGGGTTTTCCCAAAATAAGAACATTGAAGTCCTCTGCTTTGTA | |
| TTATTTTTGTTTTGCTACATTGCTATTTGGATGGGAAACTTACTCATAATGATTTCTATCAC | |
| GTGCACCCAGCTCATTCACCAACCCATGTATTTGTTCCTCAATTACCTCTCACTCTCCGACC | |
| TTTGCTACACATCCACAGTGACCCCCAAATTAATGGTTGACTTACTGGCAGAAAGAAAGAC | |
| CATTTCCTATAATAAGTGTATGATACAACTCTTTACCACCCATTTTTTTGGAGGCATAGAGA | |
| TCTTCATTCTCACAGGGATGGCCTATGACCGCTATGTGGCCATTTGCAAGCCCCTGGACTA | |
| CACCATTATTATGAGCAGGCAAAAGTGTAACACAATCATCATAGTTTGTTGTACTGGGGGA | |
| TTTATACATTCTGCCAGTCAGTTTCTTCTCACCATCTTTGTACCATTTTGTGGCCCAAATGA | |
| GATAGATCACTACTTCTGTGATGTGTATCCTTTGCTGAAATTGGCCTGTTCTAATATACACA | |
| TGATAGGTCTCTTAGTCATTGCTAATTCAGGCTTAATTGCTTTGGTGACATTTGTTGTCTTG | |
| TTGTTGTCTTATGTTTTTATATTGTATACCATCAGAGCATACTCTGCAGAGAGACGCAGCA | |
| AAGCTCTTGCCACTTGTAGTTCTCATGTAATTGTTGTGGTCCTGTTTTTTGCTCCTGCATTG | |
| TTCATTTACATTAGACCGGTCACAACATTCTCAGAAGATAAAGTGTTTGCCCTTTTTTATAC | |
| CATCATTGCTCCCATGTTCAACCCTCTCATATACACGCTGAGAAACACAGAGATGAAGAAC | |
| GCCATGAGGAAAGTGTGGTGTTGTCAAATACTCCTGAAAAGAAATCAACTTTTCTGA | |
| AOLFR58 sequences: | |
| MFSMTTEALNNFALGCTNLLMTMIPQIDLKQIFLCPNCRLYMIPVGAFIFSLGNMQNQSFVTEF | (SEQ ID NO: 105) |
| VLLGLSQNPNVQEIVFVVFLFVYIATVGGNMLIVVTILSSPALLVSPMYFFLGFLSFLDACFSSVI | |
| TPKMIVDSLYVTKTISFEGCMMQLFAEHFFAGVEVIVLTAMAYDRYVAICKPLHYSSIMMNRRL | |
| CGILMGVAWTGGLLHSMIQILFTFQLPFCGPNVINHFMCDLYPLLELACTDTHIFGLMVVINSG | |
| FICIINFSLLLVSYAVILLSLRTHSSEGRWKALSTCGSHIAVVILFFVPCIFVYTRPPSAFSLDKMA | |
| AIFYIILNPLLNPLIYTFRNKEVKQAMRRIWNRLMVVSDEKENIKL | |
| ATGTTCTCAATGACAACAGAAGCACTCAATAATTTTGCACTTGGATGTACCAACTTGTTAA | (SEQ ID NO: 106) |
| TGACTATGATACCACAAATTGATCTGAAGCAAATTTTCCTTTGTCCTAATTGCAGACTATA | |
| CATGATCCCTGTTGGAGCTTTCATCTTTTCCTTGGGAAACATGCAAAACCAAAGCTTTGTA | |
| ACTGAGTTTGTCCTCCTGGGACTTTCACAGAATCCAAATGTTCAGGAAATAGTATTTGTTG | |
| TATTTTTGTTTGTCTACATTGCAACTGTTGGGGGCAACATGCTAATTGTAGTAACCATTCTC | |
| AGCAGCCCTGCTCTTCTGGTGTCTCCTATGTACTTCTTCTTGGGCTTCCTGTCCTTCCTGGA | |
| TGCGTGCTTCTCATCTGTGATCACCCCAAAGATGATTGTAGACTCCCTCTATGTGACAAAA | |
| ACCATCTCTTTTGAAGGCTGCATGATGCAGCTCTTTGCTGAACACTTCTTTGCTGGGGTGG | |
| AGGTGATTGTGCTCACAGCCATGGCCTATGATCGTTATGTGGCCATTTGCAAGCCCTTGCA | |
| TTACTCTTCTATCATGAACAGGAGGCTCTGTGGCATTCTGATGGGGGTAGCCTGGACAGGG | |
| GGCCTCTTGCATTCCATGATACAAATTCTTTTTACTTTCCAGCTTCCCTTTTGTGGCCCCAA | |
| TGTCATCAATCACTTTATGTGTGACTTGTACCCGTTACTGGAGCTTGCCTGCACTGATACTC | |
| ACATCTTTGGCCTCATGGTGGTCATCAACAGTGGGTTTATCTGCATCATAAACTTCTCCTTG | |
| TTGCTTGTCTCCTATGCTGTCATCTTGCTCTCTCTGAGAACACACAGTTGTGAAGGGCGCTG | |
| GAAAGCTCTCTCCACCTGTGGATCTCACATTGCTGTTGTGATTTTGTTCTTTGTCCCATGCA | |
| TATTTGTATATACACGACCTCCATCTGCTTTTTCCCTTGACAAAATGGCGGCAATATTTTAT | |
| ATCATCTTAAATCCCTTGCTCAATCCTTTGATTTACACTTTCAGGAATAAGGAAGTAAAAC | |
| AGGCCATGAGGAGAATATGGAACAGACTGATGGTGGTTTCTGATGAGAAAGAAAATATTA | |
| AACTTTAA | |
| AOLFR59 sequences: | |
| MGDWNNSDAVEPIFILRGFPGLEYVHSWLSILFCLAYLVAFMGNVTILSVIWIESSLHQPMYYFI | (SEQ ID NO: 107) |
| SILAVNDLGMSLSTLPTMLAVLWLDAPEIQASACYAQLFFIHTFTFLESSVLLAMAFDRFVAICH | |
| PLHYPTILTNSVIGKIGLACLLRSLGVVLPTPLLLRHYHYCHGNALSHAFCLHQDVLRISCTDA | |
| RTNSIYGLCVVIATLGVDSWILLSYVLILNTVLDIASREEQLKALNTCVSHICVVLIFFVPVIGVS | |
| MVHRFGKHLSPIVHILMADIYLLLPPVLNPIVYSVRTKQIRIGILHKFVLRRRF | |
| ATGGGAGACTGGAATAACAGTGATGCTGTGGAGCCCATATTTATCCTGAGGGGTTTTCCTG | (SEQ ID NO: 108) |
| GACTGGAGTATGTTCATTCTTGGCTCTCGATCCTCTTCTGTCTTGCATATTTGGTAGCATTT | |
| ATGGGTAATGTTACCATCCTGTCTGTCATTTGGATAGAATCCTCTGTCCATCAGCCGATGTA | |
| TTACTTTATTTCCATCTTAGGAGTGAATGACCTGGGGATGTCCCTGTCTACACTTCCCACCA | |
| TGCTTGCTGTGTTATGGTTGGATGCTCCAGAGATCCAGGCAAGTGCTTGCTATGCTCAGCT | |
| GTTCTTCATCCACACATTCACATTCCTGGAGTCCTCAGTGTTGGTGGCCATGGCCTTTGACC | |
| GTTTTGTTGCTATCTGCGATCCACTGCACTACCCCACCATCCTCACCAACAGTGTAATTGGC | |
| AAAATTGGTTTGGCCTGTTTGCTACGAAGCTTGGGAGTTGTACTTCCCACACCTTTGCTACT | |
| GAGACACTATCACTACTGCCATGGCAATGCCCTCTGTCACGCCTTCTGTTTGCACCAGGAT | |
| GTTCTAAGATTATCCTGTACAGATGCCAGGACCAACAGTATTTATGGGCTTTGTGTAGTCA | |
| TTGCCACACTAGGTGTGGATTCAATCTTCATACTTCTTTGTTATGTTGTGATTCTTAATACT | |
| GTGCTGGATATTGCATCTCGTGAAGAGCAGCTAAAGGCACTCAACACATGTGTATCGCATA | |
| TCTGTGTGGTGCTTATCTTCTTTGTGCCAGTTATTGGGGTGTCAATGGTCCATCGCTTTGGG | |
| AAGCATCTGTCTCCCATAGTCCACATCCTCATGGCAGACATCTACCTTCTTCTTCCCCCAGT | |
| CCTTAACCCTATTGTCTATAGTGTCAGAACAAAGCAGATTCGTCTAGGAATTCTCCACAAG | |
| TTTGTCCTAAGGAGGAGGTTTTAA | |
| AOLFR60 sequences: | |
| MFLPNDTQFHPSSFLLLGIPGLETLHIWIGFPFCAVYMIALIGNFTILLVIKTDSSLHQPMFYFLA | (SEQ ID NO: 109) |
| MLATTDVGLSTATIPKIMLGIFWINLRGIIFEACLTQMFFIHNFTLMESAVLVAMAYDSYVAICN | |
| PLQYSAILTNKVVSVIGLGVFVRALIFVIPSILLILRIPFCGNHVIPHTYCEHMGLAHLSCASIKINI | |
| IYGLCAICNLVFDITVIALSYVHILCAVFRLPTHEPRLKSLSTCGSHVCVILAFYTPALFSFMTHC | |
| FGRNVPRYIHILLANLYVVVPPMLNPVIYGVRTKQIYKCVKKALLQEQGMEKEEYLIHTRF | |
| ATGTTCGTTCCCAATGACACCCAGTTTCACCCCTCCTCCTTCCTGTTGCTGGGGATCCCAGG | (SEQ ID NO: 110) |
| ACTAGAAACACTTCACATCTGGATCGGCTTTCCCTTCTGTGCTGTGTACATGATCGCACTC | |
| ATAGGGAACTTCACTATTCTACTTGTGATCAAGACTGACAGCAGCCTACACCAGCCCATGT | |
| TCTACTTCCTGGCCATGTTGGCCACCACTGATGTGGGTCTCTCAACAGCTACCATCCCTAA | |
| GATGCTTGGAATCTTCTGGATCAACCTCAGAGGGATCATCTTTGAAGCCTGCCTCACCCAG | |
| ATGTTTTTTATGCACAACTTCACACTTATGGAGTCAGCAGTCCTTGTGGCAATGGCTTATG | |
| ACAGCTATGTGGCCATCTGCAATCCACTCCAATATAGCGCCATCCTCACCAACAAGGTTGT | |
| TTCTGTGATTGGTCTTGGTGTGTTTGTGAGGGCTTTAATTTTCGTCATTCCCTCTATACTTC | |
| TTATATTGCGGTTGCCCTTCTGTGGGAATCATGTAATTCCCCACACCTACTGTGAGCACAT | |
| GGGTCTTGCTCATCTATCTTGTGCCAGCATCAAAATCAATATTATTTATGGTTTATGTGCCA | |
| TTTGTAATCTGGTGTTTGACATCACAGTCATTGCCCTCTCTTATGTGCATATTCTTTGTGCT | |
| GTTTTCCGTCTTCCTACTCATGAGCCCCGACTCAAGTCCCTCAGCACATGTGGTTCACATGT | |
| GTGTGTAATCCTTGCCTTCTATACACCAGCCCTCTTTTCCTTTATGACTCATTGCTTTGGCC | |
| GAAATGTGCCCCGCTATATCCATATACTCCTAGCCAATCTCTATGTTGTGGTGCCACCAAT | |
| GCTCAATCCTGTCATATATGGAGTCAGAACCAAGCAGATCTATAAATGTGTAAAGAAAAT | |
| ATTATTGCAGGAACAAGGAATGGAAAAGGAAGAGTACCTAATACATACGAGGTTCTGA | |
| AOLFR61 sequences: | |
| MSIINTSYVEITTFFLVGMPGLEYAHIWISIPICSMYLIAILGNGTILFIIKTEPSLHGPMYYFLSML | (SEQ ID NO: 111) |
| AMSDLGLSLSSLPTVLSIFLFNAPETSSSACFAQEFFIHGFSVLESSVLLIMSFDRFLAIHNPLRYT | |
| SILTTVRVAQIGIVFSFKSMLLVLPFPFTLRSLRYCKKNQLSHSYCLHQDVMKIACSDNRIDVIY | |
| GFFGALCLMVDFILIAVSYTLILKTVPGIASKKEELKALNTCVSHICAVIIFYLPIINLAVVHRFAG | |
| HVSPLINVLMANVLLLVPPLMKPIVYCVKTKQIRVRVVAKLCQWKI | |
| ATGTCCATTATCAACACATCATATGTTGAAATCACCACCTTCTTCTTGGTTGGGATGCCAG | (SEQ ID NO: 112) |
| GGCTAGAATATGCACACATCTGGATCTCTATCCCCATCTGCAGCATGTATCTTATTGCTATT | |
| CTAGGAAATGGCACCATTCTTTTTATCATCAAGACAGAGCCCTCCTTGCATGGGCCCATGT | |
| ACTATTTTCTTTCCATGTTGGCTATGTCAGACTTGGGTTTGTCTTTATCATCTCTGCCCACT | |
| GTGTTAAGCATCTTCCTGTTCAATGCCCCTGAAACTTCTTCTAGTGCCTGCTTTGCCCAGGA | |
| ATTCTTCATTCATGGATTCTCAGTACTGGAGTCCTCAGTCCTCCTGATCATGTCATTTGATA | |
| GATTCCTAGCCATCCACAATCCTGTGAGATACACCTCAATCCTGACAACTGTCAGAGTTGC | |
| CCAAATAGGGATAGTATTCTCCTTTAAGAGCATGCTCCTGGTTCTTCCCTTCCCTTTCACTT | |
| TAAGAAGCTTGAGATATTGCAAGAAAAACCAATTATCCCATTCCTACTGTGTCCACCAGGA | |
| TGTCATGAAGTTGGCCTGTTCTGACAACAGAATTGATGTTATCTATGGCTTTTTTGGAGCA | |
| CTCTGCCTTATGGTAGACTTTATTCTCATTGCTGTGTCTTACACCCTGATCCTCAAGACTGT | |
| ACCGGGAATTGCATCGAAAAAGGAGGAGCTTAAGGCTCTCAATACTTGTGTTTCACACATC | |
| TGTGCAGTGATCATCTTCTACCTGCCCATCATCAACCTGGCCGTTGTCCACCGCTTTGCCGG | |
| GCATGTCTCTCCCCTCATTAATGTTCTCATGGCAAATGTTCTCCTACTTGTACCTCCGCTGA | |
| TGAAACCAATTGTTTATTGTGTAAAAACTAAACAGATTAGAGTGAGAGTTGTAGCAAAATT | |
| GTGTCAATGGAAGATTTAA | |
| AOLFR62 sequences: | |
| MFYHNKSIFHPVTFFLIGIPGLEDFHMWISGPFCSVYLVALLGNATILLVIKVEQTLREPMFYFL | (SEQ ID NO: 113) |
| AILSTIDLALSATSVPRMLGIFWFDAHEINYGACVAQMFLIHAFTGMEAEVLLAMAFDRYVAIC | |
| APLHYATILTSLVLVGISMCIVIRPVLLTLPMVYLIYRLPFCQAHIIAHSYCEHMGIAKLSCGNIRI | |
| NGIYGLFVVSFFVLNLVLIGISYVYILRAVFRLPSHDAQLKALSTCGAHVGVICVFYIPSVFSFLT | |
| HRFGHQIPGYIHILVANLYLIIPPSLNPIIYGVRTKQIRERVLYVFTKK | |
| ATGTTTTATCACAACAAGAGCATATTTCACCCAGTCACATTTTTCCTCATTGGAATCCCAGG | (SEQ ID NO: 114) |
| TCTGGAAGACTTCCACATGTGGATCTCCGGGCCTTTCTGCTCTGTTTACCTTGTGGCTTTGC | |
| TGGGCAATGCCACCATTCTGCTAGTCATCAAGGTAGAACAGACTCTCCGGGAGCCCATGTT | |
| CTACTTCCTGGCCATTCTTTCCACTATTGATTTGGCCCTTTCTGCAACCTCTGTGCCTCGCA | |
| TGCTGGGTATCTTCTGGTTTGATGCTCACGAGATTAACTATGGAGCTTGTGTGGCCCAGAT | |
| GTTTCTGATCCATGCCTTCACTGGCATGGAGGCTGAGGTCTTACTGGCTATGGCTTTTGAC | |
| CGTTATGTGGCCATCTGTGCTCCACTACATTACGCAACCATCTTGACATCCCTAGTGTTGGT | |
| GGGCATTAGGATGTGCATTGTAATTCGTCCCGTTTTACTTACACTTCCCATGGTCTATCTTA | |
| TCTACCGCCTACCCTTTTGTCAGGCTCACATAATAGCCCATTCCTACTGTGAGGACATGGG | |
| CATTGCAAAATTGTCCTGTGGAAACATTCGTATCAATGGTATCTATGGGCTTTTTGTAGTTT | |
| CTTTCTTTGTTCTGAACCTGGTGCTCATTGGCATCTCGTATGTTTACATTCTCCGTGCTGTC | |
| TTCCGCCTCCCATCACATGATGCTCAGCTAAAAGCCCTAAGCACGTGTGGCGCTCATGTTG | |
| GAGTCATCTGTGTTTTCTATATCCCTTCAGTCTTCTCTTTCCTTACTCATCGATTTGGACAC | |
| CAAATACCAGGTTACATTCACATTCTTGTTGCCAATCTCTATTTGATTATCCGACCCTCTCT | |
| CAACCCCATCATTTATGGGGTGAGGACCAAACAGATTCGAGAGCGAGTGCTCTATGTTTTT | |
| ACTAAAAAATAA | |
| AOLFR63 sequences: | |
| MSIINTSYVEITTFFLVGMPGLEYAHIWISIPICSMYLIAILGNGTILFIIKTEPSLHEPMYYFLSML | (SEQ ID NO: 115) |
| AMSDLGLSLSSLPTVLSIFLFNAPEISSNACFAQEFFIHGFSVLESSVLLIMSFDRFLAIIINPLRYTS | |
| ILTTVRVAQIGIVFSFKSMLLVLPFPFTLRNLRYCKKNQLSHSYCLHQDVMKLACSDNRIDVIY | |
| GFFGALCLMVDFILIAVSYTLILKTVLGIASKKEQLKALNTCVSHICAVIIFYLPIINLAVVHRFAR | |
| HVSPLINVLMANVLLLVPPLTNPIVYCVKTKQIRVRVVAKLCQRKI | |
| ATGTCCATTATCAACACATCATATGTTGAAATCACCACCTTCTTCTTGGTTGGGATGCCAG | (SEQ ID NO: 116) |
| GGCTAGAATATGCACACATCTGGATCTCTATCCCCATCTGCAGCATGTATCTTATTGCTATT | |
| CTAGGAAATGGCACCATTCTTTTTATCATCAAGACAGAGCCCTCCTTGCATGAGCCCATGT | |
| ACTATTTTCTTTCCATGTTGGCTATGTCAGACTTGGGTTTGTCTTTATCATCTCTGCCCACT | |
| GTGTTAAGCATCTTCCTGTTCAATGCTCCTGAAATTTCATCCAATGCCTGCTTTGCCCAGGA | |
| ATTCTTCATTCATGGATTCTCAGTACTGGAGTCCTCAGTCCTCCTGATCATGTCATTTGATA | |
| GATTCCTAGCCATCCACAACCCTCTGAGATACACCTCAATCCTGACAACTGTCAGAGTTGC | |
| CCAAATAGGGATAGTATTCTCCTTTAAGAGCATGCTCCTGGTTCTTCCCTTCCCTTTCACTT | |
| TAAGAAACTTGAGATATTGCAAGAAAAACCAATTATCCCATTCCTACTGTCTCCACCAGGA | |
| TGTCATGAAGTTGGCCTGTTCTGACAACAGAATTGATGTTATCTATGGCTTTTTTGGAGCA | |
| CTCTGCCTTATGGTAGACTTTATTCTCATTGCTGTGTCTTACACCCTGATCCTGAAGACTGT | |
| ACTGGGAATTGCATCCAAAAAGGAGCAGCTTAAGGCTCTCAATACTTGTGTTTCACACATC | |
| TGTGCAGTGATCATCTTCTACCTGCCCATCATCAACCTGGCCGTTGTCCACCGCTTTGCCCG | |
| GCATGTCTCTCGCCTCATTAATGTTCTCATGGCAAATGTTCTCCTACTTGTACCTCCACTGA | |
| CGAACCCAATTGTTTATTGTGTAAAAACTAAACAGATTAGAGTGAGAGTTGTAGCAAAATT | |
| GTGTCAACGGAAGATTTAA | |
| AOLFR64 sequences: | |
| MTILLNSSLQRATFFLTGFQGLEGLHGWISIPFCFIYLTVILGNLTILHVICTDATLHGPMYYFLG | (SEQ ID NO: 117) |
| MLAVTDLGLCLSTLPTVLGIFWFDTREIGIPACFTQLFFIHTLSSMESSVLLSMSIDRSVAVCNPL | |
| HDSTVLTPACIVKMGLSSVLRSALLILPLPFLLKRFQYCHSHVLAHAYCLHLEIMKLACSSIIVN | |
| HIYGLFVVAGTVGVDSLLIFLSYALILRTVLSIASHQERLRALNTCVSHICAVLLFYIPMIGLSLV | |
| HRFGEHLPRVVHLFMSYVYLLVPPLMNPIIYSIKTKQIRQRIIKKFQFIKSLRCFWKD | |
| ATGACAATTCTTCTTAATAGCAGCCTCCAAAGAGCCACTTTCTTCCTGACGGGCTTCCAAG | (SEQ ID NO: 118) |
| GTCTAGAAGGTCTCCATGGCTGGATCTCTATTCCCTTCTGCTTCATCTACCTGACAGTTATC | |
| TTGGGGAACCTCACCATTCTCCACGTCATTTGTACTGATGCCACTCTCCATGGACCCATGT | |
| ACTATTTCTTGGGCATGCTAGCTGTCACAGACTTAGGCCTTTGCCTTTCCACACTGCCCACT | |
| GTGCTGGGCATTTTCTGGTTTGATACCAGAGAGATTGGCATCCCTGCCTGTTTCACTCAGC | |
| TCTTCTTCATCCACACCTTGTCTTCAATGGAGTCATCAGTTCTGTTATCCATGTCCATTGAC | |
| CGCTCCGTGGCCGTCTGCAACCCACTGCATGACTCCACCGTCCTGACACCTGCATGTATTG | |
| TCAAGATGGGGCTAAGCTCAGTGCTTAGAAGTGCTCTCCTCATCCTCCCCTTGCCATTCCTC | |
| CTGAAGGGCTTCCAATACTGCCACTCCCATGTGCTGGCTCATGCTTATTGTCTTGACGTGGA | |
| GATCATGAAGCTGGCCTGCTCTAGCATCATTGTCAATCACATCTATGGGCTCTTTGTTGTG | |
| GCCTGCACCGTGGGTGTGGACTCCCTGCTCATCTTTCTCTCATACGCCCTCATCCTTCGCAC | |
| CGTGCTCAGCATTGCCTCCCACCAGGAGCGACTCCGAGCCCTCAACACCTGTGTCTCTCAT | |
| ATCTGTGCTGTACTGCTCTTCTACATGCCCATGATTGGCTTGTCTCTTGTGCATCGCTTTGG | |
| TGAACATCTGCCCCGCGTTGTACACCTCTTCATGTCCTATGTGTATCTGCTGGTACCACCCC | |
| TTATGAACCCCATCATCTACAGCATCAAGACCAAGCAATTCGCCAGCGCATCATTAAGAA | |
| GTTTCAGTTTATAAAGTCACTTAGGTGTTTTTGGAAGGATTAA | |
| AOLFR65 sequences: | |
| MAGRMSTSNHTQFHPSSFLLLGIPGLEDVHIWIGVPFFFVYLVALLGNTALLFVIQTEQSLHEPM | (SEQ ID NO: 119) |
| YYFLAMLDSIDLGLSTATIPKMLGIFWFNTKEISFGGCLSHMFFIHFFTAMESIVLVAMAFDRYI | |
| AICKPLRYTMILTSKIISLIAGIAVLRSLYMVVPLVFLLLRLPFCGHRIIPHTYCEHMGIARLACAS | |
| IKVNIRFGLGNISLLLLDVILIILSYVRILYAVFCLPSWEARLKALNTGGSHIGVILAFFTPAFFSFL | |
| THRFGHNIPQYIHIILANLYVVVPPALNPVIYGVRTKQIRERVLRIFLKTNH | |
| ATGGCAGGAAGAATGTCTACGTCTAATCACACCCAGTTCGATGCTTCTTCATTCCTACTGCT | (SEQ ID NO: 120) |
| GGGTATCCCAGGGCTAGAAGATGTGCACATTTGGATTGGAGTCCCTTTTTTCTTTGTGTAT | |
| CTTGTTGCACTCCTGGGAAACACTGCTCTCTTGTTTGTGATCCAGACTGAGCAGAGTCTCC | |
| ATGAGCCTATGTACTACTTCCTGGCCATGTTGGATTCCATTGACCTGGGCTTGTCTACAGC | |
| CACCATCCCCAAAATGTTGGGCATCTTCTGGTTCAATACCAAAGAAATATCTTTTGGAGGC | |
| TGCCTTTCTCACATGTFFCTTCATCCATTTCTTCAGTGCTATGGAGAGCATTGTGTTGGTGGC | |
| CATGGCCTTTGACCGGTACATTGCCATTTGCAAACCTCTTGGGTACACCATGATCCTCACCA | |
| GCAAAATCATCAGCCTCATTGCAGGCATTGCTGTCCTGAGGAGCCTGTACATGGTTGTTCC | |
| ACTGGTGTTTCTCCTTCTGAGGCTGGCCTTCTGTGGGCATCGTATCATCCGTCATACTTATT | |
| GTGAGCACATGGGCATTGCCCGTCTGGCCTGTGCCAGCATCAAAGTCAACATTAGGTTTGG | |
| CCTTGGCAACATATCTCTCTTGTTACTGGATGTTATCCTTATTATTCTCTCCTATGTCAGGA | |
| TCCTGTATGCTGTCTTCTGCCTGCCCTCCTGGGAAGCTCGACTCAAAGCTCTCAACACCTGT | |
| GGTTCTCATATTGGTGTTATCTTAGCCTTTTTTACACCAGCATTTTTTTCATTCTTGACACA | |
| TCGTTTTGGCCATAATATCCCACAGTATATACATATTATATTAGCCAACCTGTATGTGGTTG | |
| TCCCACGAGCCCTCAATCCTGTAATCTATGGAGTCAGGACAAAGCAGATTCGAGAGAGAG | |
| TGCTGAGGATTTTTCTCAAGACCAATCACTAA | |
| AOLFR66 sequences: | |
| MSFLNGTSLTPASFILNGIPGLEDVHLWISFPLCTMYSIAITGNFGLMYLIYCDEALHRPMYVFL | (SEQ ID NO: 121) |
| ALLSFTDVLMCTSTLPNTLFILWFNLKEIDFKACLAQMFFVHTFTGMESGVLMLMALDHCVAI | |
| CFPLRYATILTNSVIAKAGFLTFLRGVMLVIPSTFLTKRLPYCKGNVIPHTYCDHMSVAKISCGN | |
| VRVNAIYGLIVALLIGGFDILCITISYTMILQAVVSLSSADARQKAFSTCTAHFCAIVLTYVPAFF | |
| TFFTHHFGGHTIPLHIHIIMANLYLLMPPTMNPIVYGVKTRQVRESVIRFFLKGKDNSHNF | |
| ATGTCATTTCTAAATGGCACCAGCCTAACTCCAGCTTCATTCATCCTAAATGGCATCCCTG | (SEQ ID NO: 122) |
| GTTTGGAAGATGTGCATTTGTGGATCTCCTTCCCACTGTGTACCATGTACAGCATTGCTATT | |
| ACAGGGAACTTCGGCCTTATGTAGCTCATGTACTGTGATGAGGCCTTACACAGACCTATGT | |
| ATGTCTTCCTTGCCCTTCTTTCCTTCACAGATGTGCTCATGTGCACCAGCACCCTTCCCAAC | |
| ACTCTCTTCATATTGTGGTTTAATCTCAAGGAGATTGATTTTAAAGCCTGCCTCGCCCAGAT | |
| GTTCTTTGTGCACACCTTCAGAGGGATGGAGTCTGGGGTGCTCATGGTCATGGCCCTGGAC | |
| CACTGTGTGGGCATCTGGTTCCCTCTGCGTTATGCCACCATGCTCAGTAATTCAGTCATTGC | |
| TAAAGCTGGGTTCCTCACTTTTCTTAGGGGTGTGATGCTTGTTATCCCTTCCACTTTCCTCA | |
| CCAAGCGCCTTCCATACTGCAAGGGCAACGTCATACCCCACACCTACTGTGACCACATGTC | |
| TGTGGCCAAGATATCTTGTGGTAATGTCAGGGTTAACGCCATCTATGGTTTGATAGTTGCC | |
| CTGCTGATTGGGGGCTTTGATATCCTGTGCATTACAATCTCCTACACTATGATTCTTCAAGC | |
| AGTTGTGAGTCTATCATCAGCAGATGCTCGACAGAAGGCCTTCAGCACCTGCACTGCCCAC | |
| TTCTGTGCCATAGTCCTCACCTATGTTCCAGCCTTCTTTACCTTCTTTACACACCATTTTGG | |
| GGGACACACCATTCCTCTACACATACATATTATTATGGCTAATCTCTACCTACTAATGCCTC | |
| CCACAATGAACCCTATTGTGTATGGGGTGAAAACCAGGCAGGTACGAGAAAGTGTCATTA | |
| GGTTCTTTCTTAAGGGAAAGGACAATTCTCATAACTTTTAA | |
| AOLFR67 sequences: | |
| MSGDNSSSLTPGFFILNGVPGLEATHIWISLPFCFMYIIAVVGNCGLICLISHEEALHRPMYYFLA | (SEQ ID NO: 123) |
| LLSFTDVTLCTTMVPNMLCIFWFNLKEIDFNACLAQMFFVHMLTGMESGVLMLMALDRYVAI | |
| CYPLRYATILTNPVIAKAGLATFLRNVMLIIPFTLLTKRLPYCRGNFIPHTYCDHMSVAKVSCGN | |
| FKVNAIYGLMVALLIGVFDICCISVSYTMILQAVMSLSSADARHKAFSTCTSHMCSIVITYVAAF | |
| FTFFTHRFVGHNIPNHIHIIVANLYLLLPPTMNPIVYGVKTKQIQEGVIKFLLGDKVSFTYDK | |
| ATGTCTGGGGACAACAGCTCCAGCCTGACCCCAGGATTCTTTATCTTGAATGGCGTTCCTG | (SEQ ID NO: 124) |
| GGCTGGAAGCCACACACATCTGGATCTCCCTGCCATTCTGCTTTATGTACATCATTGCTGTC | |
| GTGGGGAACTGTGGGCTCATCTGCCTCATCAGCCATGAGGAGGCCCTGCACCGGCCCATGT | |
| ACTACTTCCTGGCCCTGCTCTCCTTCACTGATGTCACCTTGTGCACCACCATGGTACCTAAT | |
| ATGCTGTGCATATTCTGGTTCAACCTCAAGGAGATTGACTTTAACGCCTGCCTGGCCCAGA | |
| TGTTTTTTGTCCATATGCTGACAGGGATGGAGTCTGGGGTGCTCATGCTCATGGCCCTGGA | |
| CCGCTATGTGGCCATCTGCTACCCCTTACGCTATGCCACCATCCTTACCAACCCTGTCATCG | |
| CCAAGGCTGGTCTTGCCACCTTCTTGAGGAATGTGATGCTCATCATCCCArFCACTCTCCTC | |
| ACCAAGCGCCTGCCCTATTGCCGGGGGAACTTCATCCCCCACACCTACTGTGACCATATGT | |
| CTGTGGCCAAGGTATCCTGTGGCAATTTCAAGGTCAATGCTATTTATGGTCTGATGGTTGC | |
| TCTCCTGATTGGTGTGTTTGATATCTGCTGTATCTCTGTATCTTACACTATGATTTTGCAGG | |
| CTGTTATGAGCCTGTCATCAGCAGATGCTCGTCACKAAGCCTTCAGCACCTGCACATCTCA | |
| CATGTGTTCCATTGTGATCACCTATGTTGCTGCTTTTTTCACTTTTTTCACTCATCGTTTTGT | |
| AGGACACAATATCCCAAACCACATACACATCATCGTGGCCAACCTTTATCTGCTACTGCCT | |
| CCTACCATGAACCCAATTGTTTATGGAGTCAAGACCAAGCAGATTCAGGAAGGTGTAATTA | |
| AATTTTTACTTGGAGACAAGGTTAGTTTTACCTATGACAAATGA | |
| AOLFR68 sequences: | |
| MTTHRNDTLSTEASDFLLNCFVRSPSWQHWLSLPLSLLFLLAVGANTTLLMTIWLEASLHQPL | (SEQ ID NO: 125) |
| YYLLSLLSLLDIVLCLTVIPKVLTIFWFDLRPISFPACFLQMYIMNCFLAMESCTFMVMAYDRY | |
| VAICHPLRYPSIITDHFVVKAAMFILTRNVLMTLPIPILSAQLRYCGRNVIENCICANMSVSRLSC | |
| DDVTINHLYQFAGGWTLLGSDLILIFLSYTFILRAVLRLKAEGAVAKALSTCGSHFMLILFFSTIL | |
| LVFVLTHVAKKKVSPDVPVLLNVLHHVIPAALNPIIYGVRTQEIKQGMQRLLKKGC | |
| ATGACAACACACCGAAATGACACCCTCTCCACTGAAGCTTCAGACTTCCTCTTGAATTGTT | (SEQ ID NO: 126) |
| TTGTCAGATCCCCCAGCTGGCAGCACTGGCTGTCCCTGCCCCTCAGCCTCCTTTTCCTCTTG | |
| GCCGTAGGGGCCAACACCACCCTCCTGATGACCATCTGGCTGGAGGCCTCTCTGCACCAGC | |
| CCCTGTACTACCTGCTCAGCCTCCTCTCCCTGCTGGACATCGTGCTCTGCCTCACTGTCATC | |
| CCCAAGGTCCTGACCATCTTCTGGTTTGACCTCAGGCCCATCAGCTTCCCTGCCTGCTTCCT | |
| CCAGATGTACATCATGAATTGTTTCCTAGCCATGGAGTCTTGCACATTCATGGTCATGGCC | |
| TATGATCGTTATGTAGCCATCTGCCACCCACTGAGATATCCATCAATCATCACTGATCACTT | |
| TGTAGTCAAGGCTGCCATGTTTATTTTGACCAGAAATGTGCTTATGACTCTGCCCATCCCC | |
| ATCCTTTCAGCACAACTCCGTTATTGTGGAAGAAATGTCATTGAGAACTGCATCTGTGCCA | |
| ATATGTCTGTFTCCAGACTCTCCTGCGATGATGTCACCATCAATCACCTTTACCAATTTGCT | |
| GGAGGCTGGACTCTGCTAGGATCTGACCTCATCCTTATCTTCCTCTCCTACACCTTCATTCT | |
| GCGAGCTGTGCTGAGACTCAAGGCAGAGGGTGCCGTGGCAAAGGCCCTAAGCACATGTGG | |
| CTCCCACTTCATGCTCATCCTCTTCTTCAGCACCATCCTTCTGGTTTTTGTCCTCACACATGT | |
| GGCTAAGAAGAAAGTCTCCCCTGATGTGCCAGTCTTGCTCAATGTTCTCCACCATGTCATT | |
| CCTGCAGCCCTTAACCCCATCATTTACGGGGTGAGAACCCAAGAAATTAAGCAGGGAATG | |
| CAGAGGTTGTTGAAGAAAGGGTGCTAA | |
| AOLFR69 sequences: | |
| MSYSIYKSTVNIPLSHGVVHSFCHNMNCNFMHIFKYVLDFNMKNVTEVTLFVLKGFTDNLELQ | (SEQ ID NO: 127) |
| TIFFFLFLAIYLFTLMGNLGLILVVIRDSQLHKPMYYFLSMLSSVDACYSSVITPNMLVDFTTKN | |
| KVISFLGCVAQVFLACSFGTTECFLLAAMAYDRYVAIYNPLLYSVSMSPRVYMPLINASYVAGI | |
| LHATIHTVATFSLSFCGANEIRRVFCDIPPLLAISYSDTHTNQLLLFYFVGSIELVTILIVLISYGLIL | |
| LAILKMYSAEGRRKVFSTCGAHLTGVSIYYGTILFMYVRPSSSYASDHDMIVSIFYTIVIPLLNPV | |
| IYSLRNKDVKDSMKKMFGKNQVINKVYFHTKK | |
| ATGTCGTACAGTATATACAAGAGCACAGTTAACATCCCCTTGAGTCATGGTGTTGTTCATT | (SEQ ID NO: 128) |
| CTTTTTGTCATAATATGAACTGTAACTTATGCATATCTTCAAGTTTGTTCTAGATTTCAAC | |
| ATGAAGAATGTCACTGAAGTTACCTTATTTGTACTGAAGGGCTTCACAGACAATCTTGAAC | |
| TGCAGACTATCTTCTTCTTCCTGTTTCTAGCAATCTACCTCTTCACTCTCATGGGAAATTTA | |
| GGACTGATTTTAGTGGTCATTAGGGATTCCCAGCTCCACAAACGCATGTACTATTTTCTGA | |
| GTATGTTGTCTTCTGTGGATGCCTGCTATTCCTCAGTTATTACCCCAAATATGTTAGTAGAT | |
| TTTACGACAAAGAATAAAGTCATTTCATTCCTTGGATGTGTAGCACAGGTGTTTCTTGCTT | |
| GTAGTTTTGGAACCACAGAATGCTTTCTCTTGGCTGCAATGGCTTATGATCGCTATGTAGC | |
| CATCTACAACCCTGTCCTGTATTCAGTGAGCATGTCACCCAGAGTCTACATGCCACTCATC | |
| AATGCTTCCTATGTTGCTGGCATTTTACATGCTACTATACATACAGTGGCTACATTTAGCCT | |
| ATCCTTCTGTGGAGCCAATGAAATTAGGCGTGTCTTTTGTGATATCCGTCCTCTCCTTGCTA | |
| TTTCTTATTCTGACACTCACACAAACCAGCTTCTACTCTTCTACTTTGTGGGGTCTATCGAG | |
| CTGGTCACTATCCTGATTGTTCTGATCTCCTATGGTTTGATTCTGTTGGCCATTCTGAAGAT | |
| GTATTCTGCTGAAGGGAGGAGAAAAGTCTTCTCCACATGTGGAGCTCACCTAACTGGAGT | |
| GTCAATTTATTATGGGACAATCCTCTTCATGTATGTGAGACCAAGTTCCAGCTATGCTTCG | |
| GACCATGACATGATAGTGTCAATATTTTACACGATTGTGATTCCCTTGCTGAATCCCGTCAT | |
| CTACAGTTTGAGGAACAAAGATGTAAAAGACTCAATGAAAAAAATGTTTGGGAAAAATCA | |
| GGTTATCAATAAAGTATATTTTCATACTAAAAAATAA | |
| AOLFR70 sequences: | |
| MDSTFTGYNLYNLQVKTEMDKLSSGLDIYRNPLKNKTEVTMFILTGFTDDFELQVFLFLLFFAI | (SEQ ID NO: 129) |
| YLFTLIGNLGLVVLVIEDSWLHNPMYYFLSVLSFLDACYSTVVTPKMLVNFLAKNKSISFIGCA | |
| TQMLLFVTFGTTECFLLAAMAYDHYVAIYNPLLYSVSMSPRVYVPLITASYVAGILHATIHIVA | |
| TFSLSFCGSNEIRHVFCDMPPLLAISCSDTHTNQLLLFYFVGSIEIVTILIVLISCDFILLSILKMHSA | |
| KGRQKAFSTCGSHLTGVTIYHGTILVSYMRPSSSYASDHDIIVSIFYTIVIPKLNPIIYSLRNKEVK | |
| KAVKKMLKLVYK | |
| ATGGACTCCACTTTCACAGGCTATAACCTTTATAACCTGCAAGTAAAAACTGAAATGGACA | (SEQ ID NO: 130) |
| AGTTGTCATCAGGTTTGGATATATACAGGAATCCACTGAAGAACAAGACTGAAGTCACCA | |
| TGTTTATATTGACAGGCTTCACAGATGATTTTGAGCTGCAAGTCTTCCTATTTTTACTATTT | |
| TTTGCAATCTATCTCTTTACCTTGATAGGCAATTTAGGGCTGGTTGTGTTGGTCATTGAGG | |
| ATTCCTGGCTCCACAACCCCATGTATTATTTTCTTAGTGTTTTATCATTCTTGGATGCTTGC | |
| TATTCTACAGTTGTCACTCCAAAAATGTTGGTCAATTTCCTGGCAAAAAATAAATCCATTT | |
| CATTTATCGGATGTGCAACACAGATGCTTCTTTTTGTTACTTTTGGAACTACAGAATGTTTT | |
| CTCTTGGCTGCAATGGCTTATGATCACTATGTAGCCATCTACAACCCTGTCCTGTATTCAGT | |
| GAGCATGTCACCCAGAGTCTATGTGCCACTCATGACTGCTTCCTACGTTGCTGGCATTTTAC | |
| ATGCTAGTATACATATAGTGGCTACATTTAGCCTGTCCTTCTGTGGATCCAATGAAATTAG | |
| GCATGTCTTTTGTGATATGCGTCCTCTCCTTGCTATTTCTTGTTCTGACACTCACACAAACC | |
| AGCTTCTACTCTTCTACTTTGTGGGTTCTATTGAGATAGTCACTATCCTGATTGTCCTCATT | |
| TCCTGTGATTTCATTCTGTTGTCCATTCTGAAGATGCATTCTGCTAAGGGAAGGCAAAAGG | |
| CCTTCTCTACATGTGGCTCTCACCTAACTGGAGTGACAATTTATGATGGAACAATTCTCGTC | |
| AGTTATATGAGACCAAGTTCCAGCTATGCTTCAGACCATGACATCATAGTGTCAATATTTT | |
| ACACAATTGTGATTCCCAAGTTGAATCCCATCATCTATAGTTTGAGGAACAAAGAAGTAAA | |
| AAAGGCAGTGAAGAAAATGTTGAAATTGGTTTACAAATGA | |
| AOLFR71 sequences: | |
| MGRRNNTNVPDFILTGLSDSEEVQMALFILFLLIYLITMLGNVGMILIIRLDLQLHTPMYFFLTH | (SEQ ID NO: 131) |
| LSFIDLSYSTVITPKTLANLLTSNYISFMGCFAQMFFFVFLGAAECFLLSSMAYDRYVAICSPLRY | |
| PVIMSKIRLCCALVTGPYVISFINSFVNVVWMSRLHFCDSNVVRHFFCDTSPILALSCMDTYDIEI | |
| MIHILAGSTLMVSLITISASYVSILSTILKTNSTSGKQKALSTCASHLLGVTIFYGTMIFTYLKPRK | |
| SYSLGRDQVASVFYTIVIPMLNPLIYSLRNKEVKINALIRVMQRRQDSR | |
| ATGGGTAGAAGAAATAACACAAATGTGCCTGACTTCATCCTTACGGGACTGTCAGATTCTG | (SEQ ID NO: 132) |
| AAGAGGTCCAGATGGCCCTCTTTATACTATTTCTCCTGATATACCTAATTACTATGCTGGGC | |
| AATGTGGGGATGATATTGATAATCCGCCTGGACCTCCAGCTTCACACTCCCATGTATTTTT | |
| TCCTTACTCACTTGTCATTTATTGACCTCAGTTACTCAACTGTCATGACACCTAAAACCTTA | |
| GCGAACTTACTGACTTCCAACTATATTTCCTTGATGGGCTGCTTTGCCCAGATGTTCTTTTT | |
| TGTCTTCTTGGGAGCTGCTGAATGTTTTCTTCTCTCATCAATGGCCTATGATCGCTACGTAG | |
| CTATCTGCAGTCCTCTACGTTACCCAGTTATTATGTCCAAAAGGCTGTGTTGGGCTCTTGTC | |
| ACTGGGCCCTATGTGATTAGCTTTATCAACTCCTTTGTCAATGTGGTTTGGATGAGCAGAC | |
| TGCATTTCTGCGACTCAAATGTAGTTCGTCACTTTTTCTGCGACACGTCTCCAATTTTAGCT | |
| CTGTCCTGCATGGACACATACGACATTGAAATCATGATACACATTTTAGCTGGTTCCACCC | |
| TGATGGTGTCGCTTATCACAATATCTGCATCCTATGTGTCCATTCTCTCTACCATCCTGAAA | |
| ATTAATTCCACTTCAGGAAAGCAGAAAGCTTTGTCTACTTGTGCCTCTCATCTCTTGGGAG | |
| TCACCATCTTTTATGGAACTATGATTTTTACTTATTTAAAACCAAGAAAGTCTTATTCTTTG | |
| GGAAGGGATCAAGTGGCTTCTGTTTTTTATACTATTGTGATTCCCATGCTGAATCCACTCAT | |
| TTATAGTCTTAGAAACAAAGAAGTTAAAAATGCTCTCATTAGAGTCATGCAGAGAAGACA | |
| GGACTCCAGGTAA | |
| AOLFR72 sequences: | |
| MAPENFTRVTEFILTGVSSCPELQIPLFLVFLVLYGLTMAGNLGIITLTSVDSRLQTPMYFFLQHL | (SEQ ID NO: 133) |
| ALINLGNSTVIAPKMLINFLVKKKTTSFYECATQLGGFLFFIVSEVIMLALMACDRYVAICNPLL | |
| YMVVVSRRLCLLLVSLTYLYGFSTAIVVSSYVFSVSYCSSNIINHFYCDNVPLLALSCSDTYLPE | |
| TVVFISAATNVVGSLHVLVSYFNIVLSILKICSSEGRKKAFSTCASHMMAVTIFYGTLLFMYVQP | |
| RSNHSLDTDDKMASVFYTLVIPMLNPLIYSLRNKDVKTALQRFMTNLCYSFKTM | |
| ATGGCTCCTGAAAATTTCACCAGGGTCACTGAGTTTATTCTTACAGGTGTCTCTAGCTGTC | (SEQ ID NO: 134) |
| CAGAGCTCCAGATTCCCCTCTTCCTGGTCTTTCTGGTGCTGTATGGGCTGACCATGGCAGG | |
| GAACCTGGGCATGATGACCCTCACCAGTGTTGACTCTCGACTTCAAACCCCCATGTACTTTT | |
| TCCTGCAACATCTGGCTCTCATTAATCTTGGTAACTCTACTGTCATTGCCCCTAAAATGCTG | |
| ATTAACTTTTTAGTAAAGAAGAAAACTACCTCATTCTATGAATGTGCGACCCAACTGGGAG | |
| GGTTCTTGTTCTTTATTGTATCGGAGGTAATCATGCTGGCTTTGATGGCGTGTGACCGCTAT | |
| GTGGCTATTTGTAACCCTCTGCTGTACATGGTGGTGGTGTCTCGGCGGCTCTGCCTCCTGCT | |
| GGTCTGCCTCACATACCTCTATGGCTTTTCTACAGCTATTGTGGTTTCATCTTATGTATTCT | |
| CTGTGTCTTATTGCTCTTCTAATATAATCAATGATTTTTACTGTGATAATGTTCCTCTGTTA | |
| GCATTATCTTGCTCTGATACTTACTTACCAGAAACAGTTGTCTTTATATCTGCAGCAACAA | |
| ATGTGGTTGGTTCCTTGATTATAGTTCTAGTATCTTATTTCAATATTGTTTTGTCTATTTTA | |
| AAAATATGTTCATCAGAAGGAAGGAAAAAAGCCTTTTCTACCTGTGCTTCACATATGATGG | |
| CAGTCACAATTTTTTATGGGACATTGCTATTCATGTATGTGCAGCCCCGAAGTAACCATTC | |
| ATTGGATACTGATGATAAGATGGCTTCTGTGTTTTACACGTTGGTAATTCCTATGGTGAAT | |
| CCCTTGATCTACAGCCTGAGGAATAAGGATGTGAAGACTGCTCTACAGAGATTCATGACA | |
| AATCTGTGCTATTCCTTTAAAACAATGTAA | |
| AOLFR73 sequences: | |
| MNHVVKHNHTAVTKVTEFILMGITDNPGLQAPLFGLFLIIYLVTVIGNLGMVILTYLDSKLHTP | (SEQ ID NO: 135) |
| MYFFLRHLSITDLGYSTVIAPKMLVNFIVHKNTISYNWYATQLAFFEIFIISELFILSAMAYDRYV | |
| AICKPLLYVIIMAEKVLWVLVIVPYLYSTFVSLFLTIKLFKLSFCGSNIISYFYCDCIPLMSILCSDT | |
| NELELIILIFSGCNLLFSLSIVLISYMFILVAILRMNSRKGRYKAFSTCSSHLTVVIMFYGTLLFIYL | |
| QPKSSHTLAIDKMASVFYTLLIPMLNPLIYSLRNKEVKDALKRTLTNRFKIPI | |
| ATGAATCATGTGGTAAAACACAATCACACGGCAGTGACCAAGGTGACTGAATTTATTCTCA | (SEQ ID NO: 136) |
| TGGGGATTACAGACAACCCTGGGCTGCAGGCTCCACTGTTTGGACTCTTCCTCATCATATA | |
| TCTGGTCACAGTGATAGGCAATCTGGGCATGGTTATCTTGACCTACTTGGACTCCAAGCTA | |
| CACACCCCCATGTACTTTTTCCTTAGACATTTGTCAATCACTGATCTTGGTTACTCCACTGT | |
| CATTGCCCCGAAGATGTTAGTAAACTTCATAGTGCACAAAAACACAATTTCTTACAATTGG | |
| TATGCCACTCAGCTAGCATTCTTTGAGATTTTCATCATCTCTGAGCTCTTTATTCTATCAGC | |
| AATGGCCTATGATCGCTACGTAGCCATCTGTAAACCTCTTCTGTACGTGATCATCATGGCA | |
| GAGAAAGTACTTTGGGTGCTGGTAATTGTTCCCTATCTCTATAGCAGGTTTGTGTCACTATT | |
| TCTCACAATTAAGTTATTTAAACTGTCCTTCTGTGGCTCAAACATAATCAGCTATTTTTACT | |
| GTGACTGTATCCCTCTGATGTCCATACTCTGTTCTGACACAAATGAATTAGAATTAATAAT | |
| TTTGATCTTCTCAGGCTGTAATTTGCTCTTCTCCCTCTCAATTGTTCTCATATCCTACATGTT | |
| TATTCTAGTGGCCATTCTCAGAATGAACTCAAGGAAAGGGAGGTACAAAGCCTTCTCCACC | |
| TGTAGCTCTCATCTGACAGTGGTGATCATGTTCTATGGGACATTGTTATTTATTTACTTGCA | |
| ACCCAAGTCCAGTCATACTTTGGCTATTGATAAAATGGCCTCAGTGTTTTATACCCTGTTG | |
| ATTCCTATGCTGAATCCGTTGATCTACAGCCTAAGGAACAAAGAAGTAAAAGATGCTCTAA | |
| AGAGAACTTTAACCAATCGATTCAAAATTCCCATTTAA | |
| AOLFR74 sequences: | |
| MEQHNLTTVNEFILTGITDIAELQAPLFALFLMIYVISVMGNLGMIVLTKLDSRLQTPMYFFLRH | (SEQ ID NO: 137) |
| LAFMDLGYSTTVGPKMLVNFVVDKNIISYYFCATQLAFFLVFIGSELFILSAMSYDLYVAICNPL | |
| LYTVIMSRRVCQVLVAIPYLYCTFISLLVTIKIFTLSFCGYNVISHFYCDSLPLLPLLGSNTHEIELI | |
| ILIFAAIDLISSLLIVLLSYLLILVAILRMNSAGRQKAFSTCGAHLTVVIVFYGTLLFMYVQPKSSH | |
| SFDTDKVASIFYTLVIPMLNPLIYSLRNKDVKYALRRTWNNLCNIFV | |
| ATGGAACAACACAATCTAACAACGGTGAATGAATTCATTCTTACGGGAATCACAGATATC | (SEQ ID NO: 138) |
| GCTGAGCTGCAGGCACCATTATTTGCATTGTTCCTCATGATCTATGTGATCTCAGTGATGG | |
| GCAATTTGGGCATGATTGTCCTCACCAAGTTGGACTCCAGGTTGCAAACCCCTATGTACTT | |
| TTTTCTCAGACATCTGGCTTTCATGGATCTTGGTTATTCAACAACTGTGGGACCCAAAATG | |
| TTAGTAAATTTTGTTGTGGATAAGAATATAATTTCTTATTATTTTTGTGCAACACAGCTAGC | |
| TTTCTTTCTTGTGTTCATTGGTAGTGAACTTTTTATTCTCTCAGCCATGTCCTACGACCTCT | |
| ATGTGGCCATCTGTAACCCTCTGCTATACACAGTAATCATGTCACGAAGGGTATGTCAGGT | |
| GCTGGTAGCAATCCCTTACCTCTATTGCACATTCATTTCTCTTCTAGTCACCATAAAGATTT | |
| TTACTTTATCCTTCTGTGGCTACAACGTCATTAGTCATTTCTACTGTGACAGTCTCCCTTTG | |
| TTACCTTTGCTTTGTTCAAATACACATGAATTGAATTGATAATTCTGATCTTTGCAGCTAT | |
| TGATTTGATTTCATCTCTTCTGATAGTTCTTTTATCTTACCTGCTCATCCTTGTAGCCATTCT | |
| CAGGATGAATTCTGCTGGCAGACAAAAGGCTTTTTCTACCTGTGGAGCCCACCTGACAGTG | |
| GTCATAGTGTTCTATGGGACTTTGCTTTTCATGTACGTGCAGCCCAAGTCCAGTCATTCCTT | |
| TGACACTGATAAAGTGGCTTCCATATTTTACACCCTGGTTATCCCCATGTTGAATCCCTTGA | |
| TCTATAGTTTACGAAACAAAGATGTAAAATATGCCCTACGAAGGACATGGAATAACTTATG | |
| TAATATTTTTGTTTAA | |
| AOLFR75 sequences: | |
| MEGKNQTNISEFLLLGFSSWQQQQVLLFALFLCLYLTGLFGNLLILLAIGSDHCLHTPMYFFLA | (SEQ ID NO: 139) |
| NLSLVDLCLPSATVPKMLLNIQTQTQTISYPGCLAQMYFCMMFANMDNFLLTVMAYDRYVAI | |
| CHPLHYSTIMALRLCASLVAAPWVIAILNPLLHTLMMAHLHFCSDNVIHHFFCDINSLLPLSCSD | |
| TSLNQLSVLATVGLIFVVPSVCILVSYILIVSAVMKVPSAQGKLKAFSTCGSHLALVILFYGANT | |
| GVYMSPLSNHSTEKDSAASVIFMVVAPVLNPFIYSLRNNELKGTLKKTLSRPGAVAHACNPSTL | |
| GGRGGWIMRSGDRDHPG | |
| ATGGAAGGGAAAAATCAAACCAATATCTCTGAATTTCTCCTCCTGGGCTTCTCAAGTTGGC | (SEQ ID NO: 140) |
| AACAACAGCAGGTGCTACTCTTTGCACTTTTCCTGTGTCTCTATTTAACAGGGCTGTTTGGA | |
| AACTTACTCATCTTGCTGGCCATTGGCTCGGATCACTGCCTTCACACACCCATGTATTTCTT | |
| CCTTGCCAATCTGTCCTTGGTAGACCTCTGCCTTCCGTCAGCCACAGTCCCCAAGATGCTAC | |
| TGAACATCCAAACCCAAACCCAAACCATCTCCTATCCCGGCTGCCTGGCTCAGATGTATTT | |
| CTGTATGATGTTTGCCAATATGGACAATTTTCTTCTCACAGTGATGGCATATGACCGTTAC | |
| GTGGCCATCTGTCACCCTTTACATTAGTCCACCATTATGGCCCTGCGCCTCTGTGCCTCTCT | |
| GGTAGCTGCACCTTGGGTCATTGCCATTTTGAACCCTCTCTTGCACACTCTTATGATGGCCC | |
| ATCTGCACTTCTGCTCTGATAATGTTATCCACCATTTCTTCTGTGATATCAACTCTCTCCTC | |
| CCTCTGTCCTGTTCCGACACCAGTCTTAATCAGTTGAGTGTTCTGGCTACGGTGCGGCTGA | |
| TCTTTGTGGTACCTTCAGTGTGTATCCTGGTATCCTATATCCTCATTGTTTCTGCTGTGATG | |
| AAAGTCCCTTCTGCCCAAGGAAAACTCAAGGCTTTCTCTACCTGTGGATCTCACCTTGCCTT | |
| GGTCATTCTTTTCTATGGAGCAAACACAGGGGTCTATATGAGCCCCTTATCCAATCACTCT | |
| ACTGAAAAAGACTCAGCCGCATCAGTCATTTTTATGGTTGTAGCACCTGTGTTGAATCCAT | |
| TCATTTACAGTTTAAGAAACAATGAACTGAAGGGGACTTTAAAAAAGACCCTAAGCCGGC | |
| CGGGCGCGGTGGCTCACGCCTGTAATCCCAGCACTTTGGGAGGCCGAGGCGGGTGGATCA | |
| TGAGGTCAGGAGATCGAGACCATCCTGGCTAA | |
| AOLFR76 sequences: | |
| MENNTEVSEFILLGLTNAPELQVPLFIMFTLIYLITLTGNLGMIILILLDSHLHTPMYFFLSNLSLA | (SEQ ID NO: 141) |
| GIGYSSAVTPKVLTGLLIEDKAISYSACAAQMFFCAVFATVENYLLSSMAYDRYAAVCNPLHY | |
| TTTMTTRVCACLAIGCYVIGFLNASIQIGDTFRLSFCMSNVIHHFFCDKPAVITLTCSEKHISELIL | |
| VLISSFNVFFALLVTLISYLFILITILKRHTGKGYQKPLSTCGSHLIAIFLFYITVIIMYIRPSSSHSM | |
| DTDKIASVFYTMIIPMLSPIVYTLRNKDVKNAFMKVVEKAKYSLDSVF | |
| ATGGAGAATAATACAGAGGTGAGTGAATTCATCCTGCTTGGTCTAACCAATGCCCCAGAA | (SEQ ID NO: 142) |
| CTACAGGTTCCCCTCTTTATCATGTTTACCCTCATCTACCTCATCACTCTGACTGGGAACCT | |
| GGCGATGATCATATTAATCCTGCTGGACTCTCATCTCCACACTCCCATGTACTTTTTTCTCA | |
| GTAACCTGTCTCTTGCAGGCATTGGTTACTCCTCAGCTGTCACTCCAAAGGTTTTAACTGG | |
| GTTGCTTATAGAAGACAAAGCCATCTCCTACAGTGCCTGTGCTCCTCACATGTTCTTTITGT | |
| GCACTCTTTGCCACTGTGCAAAATTACCTCTTGTCCTCAATCGCCTATGACCGCTACGCAC | |
| CAGTGTGTAACCCCCTACATTATACCACCACCATGACAACACGTGTGTGTGCTTGTCTCGC | |
| TATAGGCTGTTATGTCATTGGTTTTCTGAATGCTTCTATCCAAATTGGAGATACATTTCGCC | |
| TCTCTTTCTGCATGTCCAATGTGATTCATCACTTTTTCTGTGACAAACCAGCAGTCATTACT | |
| CTGACCTGCTCTGAGAAACACATTAGTGAGTTGATTCTTGTTCTTATATCAAGTTTTAATGT | |
| CTTTTTTGCACTTCTTGTTACCTTGATTTCCTATCTGTTCATATTGATCACCATTCTTAAGAG | |
| GCACACAGGTAAGGGATACCAGAAGCCTTTATCTACCTGTGGTTCTCACCTCATTGCCATT | |
| TTCTTATTTTATATAACTGTCATCATCATGTACATACCACCAAGTTCCAGTCATTCCATCGA | |
| CACAGACAAAATTCCATCTGTGTTCTACACTATGATCATCCCCATGCTCAGTCCTATAGTCT | |
| ATACCCTGACGAACAAAGACGTGAAGAATGCATTCATGAAGCTTGTTGAGAAGGCAAAAT | |
| ATTCTCTAGATTCAGTCTTTTAA | |
| AOLFR77 sequences: | |
| MGDVNQSVASDFILVGLFSHSGSRQLLFSLVAVMFVIGLLGNTVLLFLIRVDSRLHTPMYFLLS | (SEQ ID NO: 143) |
| QLSLFDIGCPMVTIPKMASDFLRGEGATSYGGGAAQIFFLTLMGVAEGVLLVLMSYDRYVAVC | |
| QPLQYPVLMRRQVCLLMMGSSWVVGVLNASIQTSITLHFPYCASRIVDHFFCEVPALLKLSCA | |
| DTCAYEMALSTSGVLILMLPLSLIATSYGHVLQAVLSMRSEEARHKAVTTCSSHITVVGLFYGA | |
| AVFMYMVPCAYHSPQQDNVVSLFYSLVTPTLNPLIYSLRNPEVWMALVKVLSRAGLRQMC | |
| ATGGGGGATGTGAATCAGTCGGTGGCCTCAGACTTCATTCTGGTGGGCCTCTTCAGTCACT | (SEQ ID NO: 144) |
| CAGGATCACGCCAGCTCCTCTTCTCCCTGGTGGCTGTCATGTTTGTCATAGGCCTTCTGGGC | |
| AACACCGTTCTTCTCTTCTTGATCCGTGTGGACTCCCGGCTCCACACACCCATGTACTTCCT | |
| GCTCAGCCAGCTCTCCCTGTTTGACATTGGCTGTCCCATGGTCACCATCCCCAAGATGGCA | |
| TCAGACTTTCTGCGGGGAGAAGGTGCCACCTCCTATGGAGGTGGTGCAGCTCAAATATTCT | |
| TCCTCACACTGATGGGTGTGGCTGAGGGCGTCCTGTTGGTCCTCATGTCTTATGACCGTTA | |
| TGTTGCTGTGTGCCAGCCCCTGCAGTATCCTGTACTTATGAGACGCCAGGTATGTCTGCTG | |
| ATGATGGGCTCCTCCTGGGTGGTAGGTGTGCTCAACGCCTCCATCCAGACCTCCATCACCC | |
| TGCATTTTCCCTACTGTGCCTCCCGTATTGTGGATCACTTCTTCTGTGAGGTGCCAGCCCTA | |
| CTGAAGCTCTCCTGTGCAGATACCTGTGCCTACGAGATGGCGCTGTCCACCTCAGGGGTGC | |
| TGATCCTAATGCTCCCTCTTTCCCTCATCGCCACCTCCTACGGCCACGTGTTGCAGGCTGTT | |
| CTAAGCATGCGCTCAGAGGAGGCCAGACACAAGGCTGTCACCACCTGCTCCTCGCACATCA | |
| CGGTAGTGGGGCTCTTTTATGGTGCCGCCGTGTTCATGTACATGGTGCCTTGCGCCTACCA | |
| CAGTCCACAGCAGGATAACGTGGTTTCCCTCTTCTATAGCCTTGTCACCCCTACACTCAAC | |
| CCCCTTATCTACAGTCTGAGGAATCCGGAGGTGTGGATGGCTTTGGTCAAAGTGCTTAGCA | |
| GAGCTGGACTCAGGCAAATGTGCTGA | |
| AOLFR78 sequences: | |
| MSPDGNHSSDPTEFVLAGLPNLNSARVELFSVFLLVYLLNLTGNVLIVGVVRADTRLQTPMYF | (SEQ ID NO: 145) |
| FLGNLSCLEILLTSVIIPKMLSNFLSRQHTISFAACITQFYFYFFLGASEFLLLAVMSADRYLAICH | |
| PLRYPLLMSGAVCFRVALACWVGGLVPVLGPTVAVALLPFCKQGAVVQHFFCDSGPLLRLAC | |
| TNTKKLEETDEVLASLVIVSSLLITAVSYGLIVLAVLSIPSASGRQKAYSTCTSHLIVVTLFYGSAI | |
| FLYVRPSQSGSVDTNWAVTVITTFVTPLLNPFIYALRNEQVKEALKDMFRKVVAGVLGNLLLD | |
| KCLSEKAVK | |
| ATGAGTCCTGATGGGAACCACAGTAGTGATCCAACAGAGTTCGTCCTGGCAGGGCTCCCA | (SEQ ID NO: 146) |
| AATCTCAACAGCGCAAGAGTGGAATTATTTTCTGTGTTTCTTCTTGTCTATCTCCTGAATCT | |
| GACAGGCAATGTGTTGATTGTGGGGGTGGTAAGGGCTGATACTCGACTACAGACCCCTAT | |
| GTACTTCTTTCTGGGTAACCTGTCCTGCCTAGAGATACTGCTCACTTCTGTCATCATTCCAA | |
| AGATGCTGAGCAATTTCCTCTCAAGGCAACACACTATTTCCTTTGCTGCATGTATCACCCA | |
| ATTCTATTTCTACTTCTTTCTCGGGGCCTCCGAGTTCTTACTGTTGGCTGTCATGTCTGCGG | |
| ATCGCTACCTGGCCATCTGTCATCCTCTGCGCTACCCCTTGCTCATGAGTGGGGGTGTGTG | |
| CTTTGGTGTGGCCTTGGCCTGGTGGGTGGGGGGACTCGTCCCTGTGCTTGGTCCCACAGTG | |
| GCTGTGGCCTTGCTTCCTTTCTGTAAGCAGGGTGCTGTGGTACAGCACTTCTTCTGCGACA | |
| GTGGCCCACTGCTCCGCCTGGCTTGCACCAACACCAAGAAGCTGGAGGAGACTGACTTTGT | |
| CCTGGCCTCCCTCGTCATTGTATCTTCCTTGCTGATCACTGCTGTGTCCTACGGCCTCATTG | |
| TGCTGGCAGTCCTGAGCATCCCCTGTGCTTCAGGCCGTCAGAAGGCCTTCTCTACCTGTAC | |
| CTCCCACTTGATAGTGGTGACCCTCTTCTATGGAAGTGCCATTTTTCTCTATGTGCGGCCAT | |
| CGCAGAGTGGTTCTGTGGACACTAACTGGGCAGTGACAGTAATAACGACATTTGTGACAC | |
| CACTGTTGAATCCATTCATCTATGCCTTACGTAATGAGCAAGTCAAGGAAGGTTTGAAGGA | |
| CATGTTTAGGAAGGTAGTGGCAGGCGTTTTAGGGAATCTTTTACTTGATAAATGTCTCAGT | |
| GAGAAAGCAGTAAAGTAA | |
| AOLFR79 sequences: | |
| MTPGELALASGNHTPVTKFILQGFSNYPDLQELLFGAILLIYAITVVGNLGMMALIFTDSHLQSP | (SEQ ID NO: 147) |
| MYFFLNVLSFLDICYSSVVTPKLLVNFLVSDKSISFEGCVVQLAFFVVHVTAESFLLASMAYDR | |
| FLAICQPLHYGSIMTRGTCLQLVAVSYAFGGANSAIQTGNVFALPFCGPNQLTHYYCDIPPLLH | |
| LACANTATARVVLYVFSALVTLLPAAVILTSYCLVLVAIGRIMRSVAGP&EKDLSTCASHFLAIAI | |
| FYGTVVFTYVQPHGSTNNTNGQVVSVFYTIIIPMLNPFIYSLRNKEVKGAIQRKIQVNIFPG | |
| ATGACACCTGGAGAACTAGCCCTTGCCAGTGGCAACCACACCCCAGTCACCAAGTTCATCT | (SEQ ID NO: 148) |
| TGCAGGGATTCTCCAATTATCCAGACCTCCAGGAGCTTCTCTTCGGAGCCATCCTGCTCAT | |
| CTATGCCATAACAGTGGTGGGCAACTTGGGAATGATGGCACTCATCTTCACAGACTCCCAT | |
| CTCCAAAGCCCAATGTATTTCTTCCTCAATGTCCTCTCGTTTCTTGATATTTGTTACTCTTCT | |
| GTGGTCACACCTAAGCTCTTGGTCAACTTCCTGGTCTCTGACAAGTCCATCTCTTTTGAGG | |
| GCTGTGTGGTCCAGCTCGCCTTCTTTGTAGTGCATGTGACAGCTGAGAGCTTCCTGCTGGC | |
| CTCCATGGCCTATGACCGCTTGCTAGCGATCTGTCAACCCCTCCATTATGGTTCTATCATGA | |
| CCAGGGGGACCTGTCTCCAGCTGGTAGCTGTGTCCTATGCATTTGGTGGAGCCAACTCCGC | |
| TATCCAGACTGGAAATGTCTTTGCCCTGCCTTTCTGTGGGCCCAACCAGCTAACACACTAC | |
| TACTGTGACATACCACCCGTTCTCCACCTGGCTTGTGCCAACACAGCCACAGCAAGAGTGG | |
| TCCTCTATGTCTTTTCTGCTCTGGTCACCCTTCTGCCTGCTGCAGTCATTCTCACCTCCTACT | |
| GCTTGGTCTTGGTGGCCATTGGGAGGATGCGCTCAGTAGCAGGGAGGGAGAAGGACCTCT | |
| CCACTTGTGCCTCCCACTTTCTGGCCATTGCCATTTTCTATGGCACTGTGGTTTTCACCTAT | |
| GTTCAGCCCCATGGATCTACTAACAATACCAATGGCCAAGTAGTGTCCGTCTTCTACACCA | |
| TCATAATTCCCATGCTCAATCCCTTCATCTATAGCCTCCGCAACAAGGAGGTGAAGGGCGC | |
| TCTGCAGAGGAAGCTTCAGGTGAACATCTTTCCCGGCTGA | |
| AOLFR80 sequences: | |
| MEGINKTAKMQFFFRPFSPDPEVQMLIFVVFLMMYLTSLGGNATIAVIVQINHSLHTPMYFFLA | (SEQ ID NO: 149) |
| NLAVLFIFYTSSITPLALANLLSMGKTPVSITGCGTQMFFFVFLGGADCVLLVVMAYDRFIAICH | |
| PLRYRLIMSWSLCVELLVGSLVLGFLLSLPLTILIFHLPFCHNDEIYHFYCDMPAVMRLACADTR | |
| VHKTALYIISFIVLSIPLSLISISYVFIVVAILRIRSAEGRQQAYSTCSSHILVVLLQYGCTSFIYLSPS | |
| SSYSPEMGRVVSVAYTFITPILNPLIYSLRNKELKDALRKALRKF | |
| ATGGAAGGAATAAATAAAACTGCAAAGATGCAGTTTTTCTTTCGTCCATTCTCACCTGACC | (SEQ ID NO: 150) |
| CTGAGGTCCAGATGCTGATTTTTGTGGTCTTCCTGATGATGTATCTGACCAGCCTCGGTGG | |
| AAATGCTACAATTGCAGTCATTGTTCAGATCAATCATTCCCTCCACACCCCCATGTACTTTT | |
| TCCTGGCTAATCTGGCAGTTCTAGAAATCTTCTATACATCTTCCATCACCCCATTGGCCTTG | |
| GCAAACCTCCTTTCAATGGGCAAAACTCCTGTTTCCATCACGGGATGTGGCACCCAGATGT | |
| TTTTCTTTGTCTTCTTGGGTGGGGCTGATTGTGTCCTGCTGGTAGTCATGGCTTATGACCGG | |
| TTTATAGCGATCTGTCACCCTCTGCGATACAGGCTCATCATGAGCTGGTCCTTGTGTGTGG | |
| AGCTGCTGGTAGGCTCCTTGGTGCTGGGGTTCCTGTTGTCACTGCCACTCACCATTTTAATC | |
| TTCCATCTGCCATTCTGCCACAATGATGAGATCTACCACTTCTACTGTGACATGCCTGCAGT | |
| CATGCGCCTGGCTTGTGCAGACACACGCGTTCACAAGACTGCTCTGTATATCATCAGCTTC | |
| ATCGTCCTTAGCATCCCCCTCTCATTGATCTCCATCTCCTATGTCTTCATCGTGGTAGCCAT | |
| TTTACGGATCCGGTCAGCAGAAGGGCGCCAGCAAGCCTACTCTACCTGCTCTTCTCACATC | |
| TTAGTGGTCCTCCTGCAGTATGGCTGCACCAGCTTTATATACTTGTCCCCCAGTTCCAGCTA | |
| CTCTCCTGAGATGGGCCGGGTGGTATCTGTGGCCTACACATTTATCACTCCCATTTTAAAC | |
| CCCTTGATCTATAGTTTGAGGAACAAGGAACTGAAAGATGCCCTAAGGAAAGCATTGAGA | |
| AAATTCTAG | |
| AOLFR81 sequences: | |
| MGVKNHSTVTEFLLSGLTEQAELQLPLFCLFLGIYTVTVVGNLSMISIIRLNRQLHTPMYYFLSS | (SEQ ID NO: 151) |
| LSFLDFCYSSVITPKMMKLWMESHLIVPETRPSPRMMSNQTLVTEFILQGFSEHPEYRVFLFSCF | |
| LFLYSGALTGNVLITLAITFNPGLHAPMYFFLLNLATMDIICTSSIMPKALASLVSEESSISYGGC | |
| MAQLYFLTWAASSELLLLTVMAYDRYAAICHPLHYSSMMSKVFCSGLATAVWLLCAVNTAIH | |
| TGLMLRLDFCGPNVIIHFFCEVPPLLLLSCSSTYVNGVMIVLADAFYGIVNFLMTIASYGFIVSSI | |
| LKVKTAWGRQKAFSTCSSHLTVVCMYYTAVFYAYISPVSGYSAGKSKLAGLLYTVLSPTLNPL | |
| IYTLRNKEVKAALRKLFPFFRN | |
| ATGAAGCTGTGGATGGAGAGTCACCTGATAGTCCCAGAAACCCGTCCCAGCCCAAGGATG | (SEQ ID NO: 152) |
| ATGAGTAACCAGACGTTGGTAACCGAGTTCATCCTGCAGGGCTTTTCGGAGCACGCAGAAT | |
| ACCGGGTGTTCTTATTCAGCTGTTTCCTCTTCCTCTACTCTGGGGCCCTCACAGGTAATGTC | |
| CTCATCACCTTGGCCATCACGTTCAACCCTGGGCTCCACGCTCCTATGTACTTTTTCTTACT | |
| CAACTTGGCTACTATGGACATTATCTGCACCTCTTCCATCATGCCCAAGGCGCTGGGCAGT | |
| CTGGTGTCGGAAGAGAGCTCCATCTCCTACGGGGGGTGCATGGCCCAGCTCTATTTCCTCA | |
| CGTGGGCTGCATCCTCAGAGCTGCTGCTCCTCACGGTCATGGCCTATGACCGGTACGCAGC | |
| CATCTGCCACCCGCTGCATTACAGCAGCATGATGAGCAAGGTGTTCTGCAGCGGGCTGGCC | |
| ACAGCCGTGTGGCTGCTCTGCGCCGTCAACACGGGCATCCACACGGGGCTGATGCTGCGCT | |
| TGGATTTCTGTGGCCCCAATGTCATTATCCATTTCTTCTGCGAGGTCCCTCCCCTGCTGCTT | |
| CTCTCCTGCAGCTCCACCTACGTCAACGGTGTCATGATTGTCCTGGCGGATGCTTTCTACG | |
| GCATAGTGAACTTCCTGATGACCATCGCGTCCTATGGCTTCATCGTCTCCAGCATCCTGAA | |
| GGTGAAGACTGCCTGGGGGAGGCAGAAAGCCTTCTCCACCTGCTCTTCCCACCTGACCGTG | |
| GTGTGCATGTATTACACCGCTGTCTTCTACGCCTACATAAGCCCGGTCTCTGGCTACAGCG | |
| GAGGGAAGAGCAAGTFfGGCTGGCCTGGTGTACACTGTGCTGAGTCCTACCCTCAACCCCCT | |
| CATCTATACTTTGAGAAACAAGGAGGTCAAAGCAGCCCTCAGGAAGCTTTTCCCTTTCTTC | |
| AGAAATTAA | |
| AOLFR82 sequences: | |
| MQLNNNVTEFILLGLTQDPFWKKIVFVIFLRLYLGTLLGNLLIIISVKASQALKNPMFFFLFYLSL | (SEQ ID NO: 153) |
| SDTCLSTSIAPRMIVDALLKKTTISFSECMIQVFSSHVFGCLEIFILILTAVDRYVDICKPLHYMTII | |
| SQWVCGVLMAVAWVGSCVHSLVQIFLALSLPFCGPNVINHCFCDLQPLLKQACSETYVVNLLL | |
| VSNSGAICAVSYVMLIFSYVIFLHSLRNHSAEVIKKALSTCVSHIIVVILFFGPCIFMYTCPATVFP | |
| MDKMIAVFYTVGTSFLNPVIYTLKNTEVKSAMRKLWSKKLITDDKR | |
| ATGCAACTGAATAATAATGTGACTGAGTTCATTCTGCTTGGATTGACACAGGATCCTTTTT | (SEQ ID NO: 154) |
| GGAAGAAAATAGTGTTTGTTATTTTTTTGCGTCTCTACTTGGGAACACTGTTGGGTAATTT | |
| GCTAATCATTATTAGTGTCAAGGCCAGCCAGGCAGTTAAGAACCCAATGTTCTTCTTCCTT | |
| TTGTACTTATCTTTATCTGATACTTGCCTCTCTACTTCCATAGCCCCTAGAATGATTGTGGA | |
| TGCCCTTTTGAAGAAGACAACTATCTCCTTCAGCGAGTGCATGATCCAAGTCTTTTCATCC | |
| CATGTCTTTGGCTGCCTGGAGATCTTCATCCTCATCCTCACGGCTGTTGACCGCTATGTGGA | |
| CATCTGTAAGCCCCTGCACTACATGACCATCATAAGCCAGTGGGTCTGTGGTGTTTTGATG | |
| GCTGTGGCCTGGGTGGGATCCTGTGTGCATTCTTTAGTTCAGATTTTTCTTGCCCTGAGTTT | |
| GCCATTCTGTGGCCCCAATGTGATCAATCACTGTTTCTGTGACTTGCAGCCCTTGTTGAAA | |
| CAAGCCTGTTCAGAAACCTATGTGGTTAACCTACTCCTGGTTTCCAATAGTGGGGCCATTT | |
| GTGCAGTGAGTTATGTCATGCTAATATTCTCCTATGTCATCTTCTTGCATTCTCTGAGAAAC | |
| CACAGTGCTGAAGTGATAAAGAAAGCACTTTCCACATGTGTCTCCCACATCATTGTGGTCA | |
| TCTTGTTCTTTGGACCTTGCATATTTATGTACACATGCCCTGCAACCGTATTCCCCATGGAT | |
| AAGATGATAGCTGTATTTTATACAGTTGGAACATCTTTTCTCAACCCTGTGATTTACACGCT | |
| GAAGAATACAGAAGTGAAAAGTGCCATGAGGAAGCTTTGGAGCAAGAAATTGATCACAGA | |
| TGACAAAAGATAA | |
| AOLFR83 sequences: | |
| MGNWTAAVTEFVLLGFSLSREVELLLLVLLLPTFLLTLLGNLLIISTVLSCSRLHTPMYFFLCNL | (SEQ ID NO: 155) |
| SILDILFTSVISPKVLANLGSRDKTISFAGCITQCYFYFFLGTVEFLLLTVMSYDRYATICCPLRYT | |
| TIMRPSVCIGTVVFSWVGGFLSVLFPTILISQLPFCGSNIINHFFCDSGPLLALACADTTAIELMDF | |
| MLSSMVILCCIVLVAYSYTYIILTIVRIPSASGRKKAFNTCASHLTIVIIPSGITVFIYVTPSQKEYL | |
| EINKIPLVLSSVVTPFLNPFIYTLRNDTVQGVLRDVWVRVRGVFEKRMRAVLRSRLSSNKDHQ | |
| GRACSSPPCVYSVKLQC | |
| ATGGGTAACTGGACTGCAGCGGTGACTGAGTTTGTTCTGCTGGGGTTTTCCCTGAGCAGGG | (SEQ ID NO: 156) |
| AGGTGGAGCTGCTGCTCCTGGTGCTCCTGCTGCCCACGTTCCTGCTGACTCTTCTGGGGAA | |
| CCTGCTCATCATCTCCACTGTGCTGTCCTGCTCCCGCCTCCACACCCCCATGTACTTCTTCT | |
| TGTGCAACCTCTCTATCCTGGACATCCTCTTCACCTCAGTCATCTCTCCAAAAGTGTTGGCC | |
| AACTTAGGATCTAGGGATAAAACCATCTCGTTTGCCGGATGTATCACCCAGTGCTATTTCT | |
| ACTTTTTCTTGGGCACAGTTGAGTTCCTCCTGCTGACGGTCATGTCCTATGACCGTTATGCC | |
| ACCATGTGCTGCCCCCTGCGGTACACCACCATCATGAGACCTTCTGTCTGCATTGGGACCG | |
| TTGTATTCTCTTGGGTGGGAGGCTTCCTGTCTGTGCTCTTTCCAACCATCCTCATCTCCCAG | |
| CTGCCCTTCTGTGGCTCCAATATCATTAACCACTTCTTCTGTGACAGTGGACCCTTGCTGGC | |
| CCTGGCCTGTGCAGACACCACTGCCATCGAGCTGATGGATTTTATGCTTTTCTTCCATGGTC | |
| ATCCTCTGCTGCATAGTCCTCGTGGCCTATTCCTATACGTACATCATCTTGACCATAGTGCG | |
| CATTCCTTCTGCAAGTGGAAGGAAGAAGGCGTTTAATACCTGTGCTTCCCACCTGACCATA | |
| GTCATCATTCCTAGTGGCATCACTGTGTTTATCTATGTGACTCCCTCCCAGAAAGAATATCT | |
| GGAGATCAACAAGATCCCTTTGGTTCTGAGCAGTGTGGTGACTCCATTCCTCAACCCCTTT | |
| ATATATACTCTGAGGAATGACACAGTGCAGGGAGTCCTCAGGGATGTGTGGGTCAGGGTT | |
| CGAGGAGTTTTTGAAAAGAGGATGAGGGCAGTGCTGAGAAGCAGATTATCCTCCAACAAA | |
| GACCACCAAGGAAGGGCTTGCTCTTCTCCACCATGTGTCTATTCTGTAAAGCTCCAGTGTT | |
| AG | |
| AOLFR85 sequences: | |
| MGAKNNVTEFVLFGLFESREMQHTCFVVFFLFHVLTVLGNLLVIITINARKTLKSPMYFFLSQL | (SEQ ID NO: 157) |
| SFADICYPSTTIPKMIADTFVEHKIISFNGCMTQLFSAHFFGGTEIFLLTAMAYDRYVAICRPLHY | |
| TAIMDCRKCGLLAGASWLAGFLHSILQTLLTVQLPFCGPNEIDNFFCDVHPLLKLACADTYMV | |
| GLIVVANSGMISLASFFILIISYVIILLNLRSQSSEDRRKAVSTCGSHVITVLLVLMPPMFMYIRPS | |
| TTLAADKLIILFNIVMPPLLNPLIYTLRNNDVKNAMRKLFRVKRSLGEK | |
| ATGGGTGCCAAGAACAATGTGACTGAGTTTGTTTTATTTGGCCTTTTTGAGAGCAGAGAGA | (SEQ ID NO: 158) |
| TGCAGCATACATGCTTTGTGGTATTCTTCCTCTTTCATGTGCTCACTGTCCTGGGGAACCTT | |
| CTGGTCATCATCACCATCAATGCTAGAAAGACCCTGAAGTCTCCCATGTATTTCTTCCTGA | |
| GCCAGTTGTCTTTTGCTGACATATGTTATCCATCCACTACCATACCCAAGATGATTGCTGAC | |
| ACTTTTGTGGAGCATAAGATCATCTCCTTCAATGGCTGCATGACCCAGCTCTTTTCTGCCCA | |
| CTTCTTTGGTGGCACTGAGATCTTCCTCCTTACAGCCATGGCCTATGACCGCTATGTGGCC | |
| ATCTGTAGGCCCCTGCACTACACAGCCATCATGGATTGCCGGAAGTGTGGCCTGCTAGCGG | |
| GGGCCTCCTGGTTAGCTGGCTTCCTGCATTCCATCCTGCAGACCCTCCTCACGGTTCAGCTG | |
| CCTTTTTGTGGGCCCAATGAGATAGACAACTTCTTCTGTGATGTTCATCCCCTGCTCAAGTT | |
| GGCCTGTGCAGACACCTACATGGTAGGTCTCATCGTGGTGGCCAACAGCGGTATGATTTCT | |
| TTAGCATCCTTTTTTATCCTTATCATTTCCTATGTTATCATCTTACTGAACCTAAGAAGCCA | |
| GTCATCTGAGGACCGGCGTAAGGCTGTCTCCACATGTGGCTCACACGTAATCACTGTCCTT | |
| TTGGTTCTCATGCCCCCCATGTTCATGTACATTCGTCCCTCCACCACCCTGGCTGCTGACAA | |
| ACTTATCATCCTCTTTAACATTGTGATGCCACCTTTGCTGAACCCTTTGATCTATACACTAA | |
| GGAACAACGATGTGAAAAATGCCATGAGGAAGCTGTTTAGGGTCAAGAGGAGCTTAGGGG | |
| AGAAGTGA | |
| AOLFR86 sequences: | |
| MQLVLLLMFLLVFIGNTAPAFSVTLESMDIPQNITEFFMLGLSQNSEVQRVLFVVFLLIYVVTVC | (SEQ ID NO: 159) |
| GNMLIVVTITSSPTLASPVYFFLANLSFIDTFYSSSMAPKLIADSLYEGRTISYECCMAQLFGAHF | |
| LGGVEIILLTVMAYDRYVAICKPLHNTTIMTRHLCAMLVGVAWLGGFLHSLVQLLLVLWLPFC | |
| GPNVINHFACDLYPLLEVACTNTYVIGLLVVANSGLICLLNFLMLAASYIVILYSLRSHSADGRC | |
| KALSTGGAHFIVVALFFVPCIFTYVHPFSTLPIDKNMALFYGILTPMLNPLIYTLRNEEVKNAMR | |
| KLFTW | |
| ATGCAATTAGTTCTATTACTTATGTTTCTCCTTGTCTTTATAGGCAATACTGCACCTGCATT | (SEQ ID NO: 160) |
| CTCAGTGACCTTGGAATCTATGGACATACCACAAAATATCACAGAATTTTTCATGCTGGGG | |
| CTCTCACAGAACTCAGAGGTACAGAGAGTTCTCTTTGTGGTCTTTTTGCTGATCTATGTGG | |
| TCACGGTTTGTGGCAACATGCTCATTGTGGTCACTATCACCTCCAGCCCCACGCTGGCTTC | |
| CCCTGTGTATTTTTTCCTGGCCAACCTATCCTTTATTGACACCTTTTATTCTTCTTCTATGGC | |
| TCCTAAACTCATTGCTGACTCATTGTATGAGGGGAGAACCATCTCTTATGAGTGCTGCATG | |
| GCTCAGCTCTTTGGAGCTCATTTTTTGGGAGGTGTTGAGATCATTCTGCTCACAGTGATGG | |
| CTTATGACCGCTATGTGGCCATCTGTAAGCCCCTGCACAATACTACCATCATGACCAGGCA | |
| TCTCTGTGCCATGCTTGTAGGGGTGGCTTGGCTTGGGGGCTTCCTGCATTCATTGGTTCAG | |
| CTCCTCCTGGTCCTTTGGTTGCCCTTCTGTGGGCCCAATGTGATCAATCACTTTGCCTGTGA | |
| CTTGTACCCTTTGCTGGAAGTTGCCTGCACCAATACGTATGTCATTGGTCTGCTGGTGGTT | |
| GCCAACAGTGGTTTAATCTGCCTGTTGAACTTCCTCATGCTGGCTGCCTCCTACATTGTCAT | |
| CCTGTACTCCTTGAGGTCCCACAGTGCAGATGGGAGATGCAAAGCCCTCTCCACCTGTGGA | |
| GCCCACTTCATTGTTGTTGCCTTGTTCTTTGTGCCCTGTATATTTACTTATGTGCATCCATTT | |
| TCTACTTTACCTATAGACAAAAATATGGCATTATTTTATGGTATTCTGACACCTATGTTGAA | |
| TCCACTCATTTATACCCTGAGAAATGAAGAGGTAAAAAATGCCATGAGAAAGCTCTTTACA | |
| TGGTAA | |
| AOLFR87 sequences: | |
| MNNIAQLSLGFIDLGIPSVLQKIILTKIILLFKMYVSNCNPCAIHRKINYPNTKLDFEQVNNITEFI | (SEQ ID NO: 161) |
| LLGLTQNAEAQKLLFAVFTLIYFLTMVDNLIIVVTITTSPALDSPVYFFLSFFSFIDGCSSSTMAP | |
| KMIFDLLTEKKTISFSGCMTQLFVEHFFGGVEIILLVVMAYDCYVAICKPLYYLITMNRQVCGL | |
| LVAMAWVGGFLHALIQMLLIVWLPFCGPNVIDHFICDLFPLLKLSCTDTHVFGLFVAANSGLM | |
| CMLIFSILITSYVLILCSQRKALSTCAFHITVVVLFFVPCILVYLRPMITFPIDKAVSVFYTVVTPM | |
| LNPLIYTLRNTEVKNAMKQLWSQIIWGNNLCD | |
| ATGAATAACATAGCTCAACTTAGTCTTGGGTTTATAGATTTAGGGATTCCATCAGTGTTAG | (SEQ ID NO: 162) |
| AGAAAATAATCCTGACCAAAATTATTTTATTGTTCAAAATGTATGTGTCAAATTGCAATCC | |
| TTGTGCTATTCACAGAAAAATCAATTATCCAAATACCAAACTGGATTTCGAGCAAGTGAAC | |
| AACATAACGGAATTCATCTTGCTTGGCCTGACACAGAACGCAGAGGCACAGAAACTCTTGT | |
| TTGCTGTGTTTACACTCATCTACTTTCTCACCATGGTAGACAACCTAATCATTGTGGTGACA | |
| ATCACCACCAGCCCAGCCCTGGACTCCCCCGTGTATTTTTTTCTGTCTTTCTTTTCCTTCAT | |
| AGATGGCTGCTCCTCTTCTACCATGGCCCCCAAAATGATATTTGACTTACTCACTGAAAAG | |
| AAAACTATTTCCTTCAGTGGGTGCATGACCCAGCTCTTTGTAGAACATTTCTTTGGGGGAG | |
| TTGAGATCATTCTGCTCGTGGTGATGGCCTATGACTGCTATGTGGCCATCTGCAAGCCCCT | |
| GTACTACCTGATCACAATGAACAGGCAGGTATGTGGCCTGCTGGTGGCCATGGCATGGGTC | |
| GGGGGATTTCTTCACGCTCTGATTCAAATGCTTTTAATAGTCTGGCTGCCCTTCTGTGGCCC | |
| CAATGTCATTGACCATTTCATCTGTGACCTTTTCCCTCTGCTAAAACTCTCCTGCACTGACA | |
| CTCACGTCTTTGGACTCTTTGTTGCCGCCAACAGTGGGCTGATGTGTATGCTCATTTTTTCT | |
| ATTCTTATTACCTCTTACGTCCTAATCCTCTGCTCACAGCGGAAGGCTCTCTCTACCTGCGC | |
| CTTCCATATCACTGTAGTCGTCCTATTCTTTGTTCCCTGTATATTGGTGTACCTTCGACCCA | |
| TGATCACCTTCCCTATTGATAAAGCTGTGTCTGTGTTTTATACTGTGGTAACACCCATGTTA | |
| AACCCTTTAATCTACACCCTCAGAAACACAGAGGTGAAAAATGCCATGAAGCAGCTCTGG | |
| AGCCAAATAATCTGGGGTAACAATTTGTGTGATTAG | |
| AOLFR88 sequences: | |
| MWQKNQTSLADFILEGLFDDSLTHLFLFSLTMVVFLIAVSGNTLTILLICIDPQLHTPMYFLLSQ | (SEQ ID NO: 163) |
| LSLMDLMHVSTIILKIMATNYLSGKKSISFVGCATQHFLYLCLGGAECFLLAVMSYDRYVAICH | |
| PLRYAVLMNKKVGLMMAVMSWLGASVNSLIHMAILMHFPFCGPRKVYHFYCEFPAVXTKIVC | |
| GDITVYETTVYISSILLLLPIFLISTSYVFILQSVIQMRSSGSKRNAFATCGSHLTVVSLWFGACIFS | |
| YMRPRSQCTLLQNKVGSVFYSIITPTLNSLIYTLRNKDVAKALRRVLRRDVITQCIQRLQLWLP | |
| RV | |
| ATGTGGCAGAAGAATCAGACCTCTCTGGCAGACTTCATCCTTGAGGGGCTCTTCGATGACT | (SEQ ID NO: 164) |
| CCCTTACCCACCTTTTCCTTTTCTCCTTGACCATGGTGGTCTTCCTTATTGCGGTGAGTGGC | |
| AACACCCTCACCATTCTCCTCATCTGCATTGATCCCCAGCTTCATACACCAATGTATTTGCT | |
| GCTCAGCCAGCTCTCCCTCATGGATCTGATGCATGTCTCCACAATCATCCTGAAGATGGCT | |
| ACCAACTACCTATCTGGCAAGAAATCTATCTCCTTTGTGGGCTGTGCAACCCAGCACTTCC | |
| TCTATTTGTGTCTAGGTGGTGCTGAATGTTTTCTCTTAGCTGTCATGTCCTATGACCGCTAT | |
| GTTGCCATCTGTCATCCACTGCGCTATGCTGTGCTCATGAACAAGAAGGTGGGACTGATGA | |
| TGGCTGTCATGTCATGGTTGGGGGCATCCGTGAACTCCCTAATTCACATGGCGATCTTGAT | |
| GCACTTCCCTTTCTGTGGGCCTCGGAAAGTCTACCACTTCTACTGTGAGTTCCCAGCTGTTG | |
| TGAAGTTGGTATGTGGCGACATCACTGTGTATGAGACCACAGTGTACATCAGCAGCATTCT | |
| CCTCCTCCTCCCCATCTTCGTGATTTCTACATCCTATGTCTTCATCCTTCAAAGTGTCATTCA | |
| GATGCGCTCATCTGGGAGCAAGAGAAATGCCTTTGCCACTTGTGGCTCCCACCTCACGGTG | |
| GTTTCTCTTTGGTTTGGTGCCTGCATCTTCTCCTACATGAGACCCAGGTGCCAGTGCACTCT | |
| ATTGCAGAACAAAGTTGGTTCTGTGTTCTACAGCATCATTACGCCCACATTGAATTCTCTG | |
| ATTTATACTCTCCGGAATAAAGATGTAGCTAAGGCTCTGAGAAGAGTGGTGAGGAGAGAT | |
| GTTATCACCCAGTGCATTCAACGACTGCAATTGTGGTTGCCCCGAGTGTAG | |
| AOLFR89 sequences: | |
| MLDPSISSHTLYLHSLFPQGLRKGTMWQKNQTSLADFILEGLFDDSLTHLFLFSLTMVVFLIAVS | (SEQ ID NO: 165) |
| GNTLTILLICIDPQLHTPMYFLLSQLSLMDLMHVSTTILKMATNYLSGKKSISFVGCATQHFLYL | |
| CLGGAECFLLAVMSYDRYVAICHPLRYAVLMNKKVGLMMAVMSWLGASVNSLIHMAILMHF | |
| PFCGPRKVYHFYCEFPAVVKLVCGDITVYETTVYISSILLLLPIFLISTSYVFILQSVIQMRSSGSK | |
| RNAFATCGSHLTVVSLWFGACIFSYMRPRSQCTLLQNKVGSVFYSIITPTLNSLIYTLRNYDVA | |
| KALRRVLRRDVITQCIQRLQLWLPRV | |
| ATGCTGGACCCCAGTATTTGCAGTCACACTCTTTATCTCCACTCTCTGTTTCCTCAGGGATT | (SEQ ID NO: 166) |
| GAGAAAGGGGACAATGTGGCAGAAGAATCAGACCTCTCTGGCAGACTTCATCCTTGAGGG | |
| GCTCTTCGATGACTCCCTTACCCACCTTTTCCTTTTCTCCTTGACCATGGTGGTCTTCCTTAT | |
| TGCGGTGAGTGGCAACACCCTCACCATTCTCCTCATCTGCATTGATCCCCAGCTTCATACA | |
| CCAATGTATTTCCTGCTCAGCCAGCTCTCCCTCATGGATCTGATGCATGTCTCCACAACCAT | |
| CCTGAAGATGGCTACCAACTACCTATCTGGGAAGAAATCTATCTCCTTTGTGGGCTGTGCA | |
| ACCCAGCACTTCGTCTATTTGTGTCTAGGTGGTGCTGAATGTTTTCTGTTAGCTGTCATGTC | |
| CTATGACCGCTATGTTGCCATCTGTCATCCACTGCGCTATGCTGTGCTCATGAACAAGAAG | |
| GTGGGACTGATGATGGCTGTCATGTCATGGTTGGGGGCATCCGTGAACTCCCTAATTCACA | |
| TGGCGATCTTGATGCACTTCCCTTTCTGTGGGCCTCGGAAGTCTACCACTTCTACTGTGA | |
| GTTCCCAGCTGTTGTGAAGTTGGTATGTGGCGACATCACTGTGTATGAGACCACAGTGTAC | |
| ATCAGCAGCATTCTCCTCCTCCTCCCCATCTTCCTGATTTCTACATCCTATGTCTTCATCCTT | |
| CAAAGTGTCATTCAGATGCGCTCATCTGGGAGCAAGAGAAATGCCTTTGCCACTTGTGGCT | |
| CCCACCTCACGGTGGTTTCTCTTTGGTTTGGTGCCTGCATCTTCTCCTACATGAGACCCAGG | |
| TCCCAGTGCACTCTATTGCAGAACAAAGTTGGTTCTGTGTTCTACAGCATCATTACGCCCA | |
| CATTGAATTCTCTGATTTATACTCTCCGGAATAAAGATGTAGCTAAGGCTCTGAGAAGAGT | |
| GCTGAGGAGAGATGTTATCACCCAGTGCATTCAACGACTGCAATTGTGGTTGCCCCGAGTG | |
| TAG | |
| AOLFR90 sequences: | |
| MFSMTTEALNNFALGCTNLLMTMIPQIDLKQIFLCPNCRLYMIPVGAFIFSLGNMQNQSFVTEF | (SEQ ID NO: 167) |
| VLLGLSQNPNVQEIVFVVFLFVYIATVGGNMLIVVTILSSPALLVSPMYFFLGFLSFLDACFSSVI | |
| TPKMIVDSLYVTKTISFEGCMMQLFAEHFFAGVEVIVLTAMAYDRYVAICKPLHYSSIMNRRL | |
| CGILMGVAWTGGLLHSMIQILFTFQLPFCGPNVINHFMCDLYPLLELACTDTHIFGLMVVINSG | |
| FICIINFSLLLVSYAVILLSLRTHSSEGRWKALSTCGSHIAVVILFFVPCIFVYTRPPSAFSLDKMA | |
| AIFYIILNPLLNPLIYTFRNKEVKQAMRRIWNRLMVVSDEKENIKL | |
| ATGTTCTCAATGACAACAGAAGCACTCAATAATTTTGCACTTGGATGTACCAACTTGTTAA | (SEQ ID NO: 168) |
| TGACTATGATAGCACAAATTGATCTGAAGCAAATTTTCCTTTGTCCTAATTGCAGACTATA | |
| CATGATCCCTGTTGGAGCTTTCATCTTTTCCTTGGGAAACATGCAAAACCAAAGCTTTGTA | |
| ACTGAGTTTGTCCTCCTGGGACTTTCACAGAATCCAAATGTTCAGGAAATAGTATTTGTTG | |
| TATTTTTGTTTGTCTACATTGCAACTGTTGGGGGCAACATGCTAATTGTAGTAACCATTCTC | |
| AGCAGCCCTGCTCTTCTGGTGTCTCCTATGTACTTCTTCTTGGGCTTCCTGTCCTTCCTGGA | |
| TGCGTGGTTCTCATCTGTCATCACCCCAAAGATGATTGTAGACTCCCTCTATGTGACAAAA | |
| ACCATCTCTTTTGAAGGCTGCATGATGCAGCTCTTTGCTGAACACTTCTTTGCTGGGGTGG | |
| AGGTGATTGTCCTCACAGCCATGGCCTATGATCGTTATGTGGCCATTTGCAAGCCCTTGCA | |
| TTACTCTTCTATCATGAACAGGAGGCTCTGTGGCATTCTGATGGGGGTAGCCTGGACAGGG | |
| GGCCTCTTGCATTCCATGATACAAATTCTTTTTACTTTCCAGCTTCCCTTTTGTGGCCCCAA | |
| TGTCATCAATCACTTTATGTGTGACTTGTACCCGTTACTGGAGCTTGCCTGCACTGATACTC | |
| ACATCTTTGGCCTCATGGTGGTCATCAACAGTGGGTTTATCTGCATCATAAACTTCTCCTTG | |
| TTGCTTGTGTCCTATGCTGTCATCTTGCTCTCTCTGAGAAGACACAGTTCTGAAGGGCGCTG | |
| GAAAGCTCTCTCCACCTGTGGATCTCACATTGCTGTTGTGATTTTGTTCTTTGTCCCATGCA | |
| TATTTGTATATACACGACCTCCATCTGCTTTTTCCCTTGACAAAATGGCGGCAATATTTTAT | |
| ATCATCTTAAATCCCTTGCTCAATCCTTTGATTTACACTTTCAGGAATAAGGAAGTAAAAC | |
| AGGCCATGAGGAGAATATGGAACAGACTGATGGTGGTTTCTGATGAGAAAGAAAATATTA | |
| AACTTTAA | |
| AOLFR91 sequences: | |
| MGNWSTVTEITLIAFPALLEIRISLFVVLVVTYTLTATGNITIISLIWIDHRLQTPMYFFLSNLSFL | (SEQ ID NO: 169) |
| DILYTTVITPKLLACLLGEEKTISFAGCMIQTYFYFFLGTVEFILLAVMSFDRYMAICDPLHYTVI | |
| MNSRACLLLVLGCWVGAFLSVLFPTIVVTRLPYCRKEINHFFCDIAPLLQVACINTHLIEKINFLL | |
| SALVILSSLAFTTGSYVYIISTILRIPSTQGRQKAFSTCASHITVVSIAHGSNIFVYVRPNQNSSLD | |
| YDKVAAVLITVVTPLLNPFIYSLRNEKVQEVLRETVNRIMTLIQRKT | |
| ATGGGAAACTGGAGCACTGTGACTGAAATCACCGTAATTGCCTTCCCAGCTCTCCTGGAGA | (SEQ ID NO: 170) |
| TTCGAATATCTCTCTTCGTGGTTCTTGTGGTAACTTACACATTAACAGCAACAGGAAACAT | |
| CACCATCATCTCCCTGATATGGATTGATCATCGCCTGCAAACTCGAATGTACTTCTTCCTCA | |
| GTAATTTGTCCTTTCTGGATATCTTATACACCACTGTCATTACCCCAAAGTTGTTGGCCTGC | |
| CTCCTAGGAGAAGAGAAAACCATATCTTTTGCTGGTTGCATGATCCAAACATATTTCTACT | |
| TCTTTCTGGGGACGGTGGAGTTTATCCTCTTGGCGGTGATGTCCTTTGACCGCTACATGGC | |
| TATCTGCGACCCACTGCACTACACGGTCATCATGAACAGCAGGGCCTGCCTTCTGCTGGTT | |
| CTGGGATGCTGGGTGGGAGCCTTCCTGTCTGTGTTGTTTCCAACCATTGTAGTGACAAGGC | |
| TACCTTACTGTAGGAAAGAAATTAATCATTTCTTCTGTGACATTGCCCCTCTTCTTCAGGTG | |
| GCCTGTATAAATACTCACCTCATTGAGAAGATAAACTTTCTCCTCTCTGCCCTTGTCATCCT | |
| GAGCTCCGTGGCATTCACTACTGGGTCCTAGGTGTACATAATTTCTACCATCCTGCGTATCC | |
| CCTCCACCCAGGGCCGTCAGAAAGCTTTTTCTACCTGTGCTTCTCACATCACTGTTGTCTCC | |
| ATTGCCCACGGGAGCAACATCTTTGTGTATGTGAGACCCAATCAGAACTCCTCACTGGATT | |
| ATGACAAGGTGGCCGCTGTCCTCATCACAGTGGTGACCCCTCTCCTGAACCCTTTTATCTA | |
| CAGCTTGAGGAATGAGAAGGTACAGGAAGTGTTGAGAGAGACAGTGAACAGAATCATGAC | |
| CTTGATACAAAGGAAAACTTGA | |
| AOLFR92 sequences: | |
| MRNGTVITEFILLGFPVIQGLQTPLFIAIFLTYILTLAGNGLIIATVWAEPRLQIPMYFFLCNLSFLE | (SEQ ID NO: 171) |
| IWYTTTVIPKLLGTFVVARTVICMSCCLLQAFFHFFVGTTEFLILTIMSFDRYLTICNPLHHPTIM | |
| TSKLCLQLALSSWVVGFTIVFCQTMLLIQLPFCGNNVISHEYCDVGPSLKAACIDTSILELLGVIA | |
| TILVIPGSLLFNMISYIYILSAILRIPSATGHQKTFSTCASHLTVVSLLYGAVLFMYLRPTAHSSFK | |
| INKVVSVLNTILTPLLNPFIYTIRNKEVKGALRKAMTCPKTGWAK | |
| ATGAGAAATGGCACAGTAATCACAGAATTCATCCTGCTAGGCTTTCCTGTTATCCAAGGCC | (SEQ ID NO: 172) |
| TACAAACACCTCTCTTTATTGCAATCTTTCTCACCTACATATTAACCCTTGCAGGCAATGGG | |
| CTTATTATTGCCACTGTGTGGGCTGAGCCCAGGCTACAAATTCCAATGTACTTCTTCCTTTG | |
| TAACTTGTCTTTCTTAGAAATCTGGTACACCACCACAGTCATCCCCAAACTGCTAGGAACC | |
| TTTGTAGTGGCAAGAACAGTAATCTGCATGTCCTGCTGCCTGCTGCAGGCCTTCTTCCACT | |
| TCTTCGTGGGCACCACCGAGTTCTTGATCCTCACTATCATGTCTTTTGACCGCTACCTCACC | |
| ATCTGCAATCCCCTTCACCACCCCACCATCATGACCAGCAAACTCTGCCTGCAGCTGGCCC | |
| TGAGCTCCTGGGTGGTGGGCTTCACCATTGTCTTTTGTCAGACGATGCTGCTCATCCAGTT | |
| GCCATTCTGTGGCAATAATGTTATCAGTCATTTCTACTGTGATGTTGGGCCCAGTTTGAAA | |
| GCCGCCTGCATAGACACCAGCATTTTGGAACTCCTGGGCGTCATAGCAACCATCCTTGTGA | |
| TCCCAGGGTCACTTCTCTTTAATATGATTTCTTATATCTACATTCTGTCCGCAATCCTACGA | |
| ATTCCTTCAGCCACTGGCCACCAAAAGACTTTCTCTACCTGTGCCTCGCACCTGACAGTTGT | |
| CTCCCTGCTCTACGGGGCTGTTCTGTTCATGTACCTAAGACCCACAGCACACTCCTCCTTTA | |
| AGATTAATAAGGTGGTGTCTGTGCTAAATACTATCCTCACCCCCCTTCTGAATCCCTTTATT | |
| TATACTATTAGAAACAAGGAGGTGAAGGGAGCCTTAAGAAAGGCAATGACTTGCCCAAAG | |
| ACTGGTCATGCAAAGTAA | |
| AOLFR93 sequences: | |
| MLMNYSSATEFYLLGFPGSEELHHILFAIFFFFYLVTLMGNTVIIMIVCVDKRLQSPMYFFLGHL | (SEQ ID NO: 173) |
| SALEILVTTIIVPVMLWGLLLPGMQTIYLSACVVQLFLYLAVGTTEFALLGAMAVDRYVAVCN | |
| PLRYNIIMNRHTCNFVVLVSWVFGFLFQIWPVYVMFQLTYCKSNVVNNFFCDRGQLLKLSCN | |
| NTLFTEFILFLMAVFVLFGSLIPTIVSNAYIISTILKIPSSSGRRKSFSTCASHFTCVVIGYGSCLFLY | |
| VKPKQTQAADYNWVVSLMVSVVTPFLNPFIFTLRNDKVIEALRDGVKRCCQLFRN | |
| ATGTTGATGAATTACTCTAGTGCCACTGAATTTTATCTCCTTGGCTTCCCTGGCTCTGAAGA | (SEQ ID NO: 174) |
| ACTACATCATATCCTTTTTGCTATATTCTTCTTTTTCTACTTGGTGACATTAATGGGAAACA | |
| CAGTCATCATCATGATTGTCTGTGTGGATAAACGTCTGCAGTCCCCCATGTATTTCTTCCTC | |
| GGCCACCTCTCTGCCCTGGAGATCCTGGTCACAACCATAATCGTCCCCGTGATGCTTTGGG | |
| GATTGCTGCTCCCTGGGATGCAGACAATATATTTGTCTGCCTGTGTTGTCCAGCTCTTCTTG | |
| TACCTTGCTGTGGGGACAACAGAGTTCGCATTACTTGGAGCAATGGCTGTGGACCGTTATG | |
| TGGCTGTCTGTAACCCTCTGAGGTACAACATCATTATGAACAGACACACCTGCAACTTTGT | |
| GGTTCTTGTGTCATGGGTGTTTGGGTTTCTTTTTCAAATCTGGCCGGTCTATGTCATGTTTC | |
| AGCTTACTTACTGCAAATCAAATGTGGTGAACAATTTTTTTTGTGACCGAGGGCAATTGCT | |
| CAAACTATCCTGCAATAATACTCTTTTCACGGAGTTTATCCTCTTCTTAATGGCTGTTTTTG | |
| TTCTCTTTGGTTCTTTGATCCCTACAATTGTCTCCAACGCCTACATCATCTCCACCATTCTC | |
| AAGATCCCGTCATCCTCTGGCCGGAGGAAATCCTTCTCCACTTGTGCCTCCCACTTCACCTG | |
| TGTTGTGATTGGCTACGGCAGCTGCTTGTTTCTCTACGTGAAACCCAAGCAAACGCAGGCA | |
| GCTGATTACAATTGGGTAGTTTCCCTGATGGTTTCAGTAGTAACTCCTTTCCTCAATCCTTT | |
| CATCTTCACCCTCCGGAATGATAAAGTCATAGAGGCCCTTCGGGATGGGGTGAAACGCTGC | |
| TGTCAACTATTCAGGAATTAG | |
| AOLFR94 sequences: | |
| METWVNQSYTDGFFLLGIFSHSTADLVLFSVVMAVFTVALCGNVLLIFLIYMDPHLHTPMYFF | (SEQ ID NO: 175) |
| LSQLSLMDLMLVCTNVPKMAANFLSGRKSISFVGCGIQIGLFVCLVGSEGLLLGLMAYDRYVA | |
| ISHPLHYPILMNQRVCLQITGSSWAFGIIDGLIQMVVVMNFPYCGLRKVNHFFCEMLSLLKLAC | |
| VDTSLFEKVIFACCVFMLLFPFSIIVASYAHILGTVLQMHSAQAWKKALATCSSHLTAVTLFYG | |
| AAMFIYLRPRHYRAPSHDKVASIFYTVLTPMLNPLIYSLRNREVMGALRKGLDRCRIGSQH | |
| ATGGAGACGTGGGTGAACCAGTCCTACACAGATGGCTTCTTCCTCTTAGGCATGTTCTCCC | (SEQ ID NO: 176) |
| ACAGTACTGCTGACCTTGTCCTCTTCTCCGTGGTTATGGCGGTCTTCACAGTGGCCCTCTGT | |
| GGGAATGTCCTCCTCATCTTCCTCATCTACATGGACCCTCACCTTCACACCCCCATGTACTT | |
| CTTCCTCAGCCAGCTCTCCCTCATGGACCTCATGTTGGTCTGTACCAATGTGCCAAAGATG | |
| GCAGCCAACTTCCTGTCTGGCAGGAAGTCCATCTCCTTTGTGGGCTGTGGCATACAAATTG | |
| GCCTCTTTGTCTGTCTTGTGGGATCTGAGGGGCTCTTGCTGGGACTCATGGCTTATGACCG | |
| CTATGTGGCCATTAGCCACCCACTTCACTATCCCATCCTCATGAATCAGAGGGTCTGTCTCC | |
| AGATTACTGGGAGCTCCTGGGCCTTTGGGATAATCGATGGCTTGATCCAGATGGTGGTAGT | |
| AATGAATTTCCCCTACTGTGGCTTGAGGAAGGTGAACCATTTCTTCTGTGAGATGCTATCC | |
| TTGTTGAAGCTGGCCTGTGTAGACACATCCCTGTTTGAGAAGGTGATATTTGCTTGCTGTG | |
| TCTTCATGCTTCTCTTCCCATTCTCCATCATCGTGGCCTCCTATGCTCACATTCTAGGGACT | |
| GTGCTGCAAATGCACTCTGCTCAGGCCTGGAAAAAGGCCCTGGCCACCTGCTCCTCCCACC | |
| TGACAGCTGTCACCCTCTTGTATGGGGCAGCCATGTTCATCTACCTGAGGCCTAGGCACTA | |
| CCGGGCCCCCAGCCATGACAAGGTGGCCTCTATCTTCTACACGGTCCTTACTCCCATGCTC | |
| AACCCCCTCATTTACAGCTTGAGGAACAGGGAGGTGATGGGGGCACTGAGGAAGGGGCTG | |
| GACCGCTGCAGGATCGGCAGCCAGCACTGA | |
| AOLFR95 sequences: | |
| MLGSKPRVHLYILPCASQQVSTMGDRGTSNHSEMTDFILAGFRVRPELHILLFLLFLFVYAMILL | (SEQ ID NO: 177) |
| GNVGMMTIIMTDPRLNTPMYFFLGNLSFIDLFYSSVIEPKAMINFWSENKSISFAGCVAQLFLFA | |
| LLIVTEGFLLAAMAYDRFIAICNPLLYSVQMSTRLCTQLVAGSYFCGCISSVIQTSMTFTLSFCAS | |
| RAVDHFYCDSRPLQRLSCSDLFIHRMISFSLSCIIILPTIIVIIVSYMYIVSTVLKIHSTEGHKKAFST | |
| CSSHLGVVSVLYGAVFFMYLTPDRFPELSKVASLCYSLVTPMLYPLIYSLRNKDVQEALKKFLE | |
| KKNIIL | |
| ATGCTAGGATCCAAACCAAGAGTTCATTTGTATATTTTGCCCTGTGCCTCTCAACAGGTTTC | (SEQ ID NO: 178) |
| TACCATGGGTGACAGGGGAACAAGCAATCACTCAGAAATGACTGACTTCATTCTTGCAGG | |
| CTTCAGGGTACGCCCAGAGCTCCACATTCTCCTCTTCCTGCTATTTTTGTTTGTTTATGCCA | |
| TGATCCTTCTAGGGAATGTTGGGATGATGACCATTATTATGACTGATCCTCGGCTGAACAC | |
| ACCAATGTATTTTTTCCTAGGCAATCTCTCCTTCATTGATCTTTTCTATTCATCTGTTATTGA | |
| ACCCAAGGCTATGATCAACTTCTGGTCTGAAAACAAGTCTATCTCCTTTGCAGGCTGTGTG | |
| GCCCAGCTCTTTCTCTTTGCCCTCCTCATTGTGACTGAGGGATTTCTCCTGGCGGCCATGGC | |
| TTATGACCGCTTTATTGCCATCTGCAACCCTCTGCTCTACTCTGTTCAAATGTCCACACGTC | |
| TGTGTACTCAGTTGGTGGCTGGTTCCTATTTTTGTGGCTGCATTAGCTCAGTTATTCAGACT | |
| AGCATGACATTTACTTTATCTTTTTGCGCTTCTCGGGCTGTTGACCACTTTTACTGTGATTC | |
| TCGCCCACTTCAGAGACTGTCTTGTTCTGATCTCTTTATCCATAGAATGATATCTTTTTCCT | |
| TATCATGTATTATTATCTTGCCTACTATCATAGTCATTATAGTATCTTACATGTATATTGTG | |
| TCCACAGTTCTAAAGATACATTCTACTGAGGGACATAAGAAGGCCTTCTCCACCTGCAGCT | |
| CTCACCTGGGAGTTGTGAGTGTGCTGTATGGTGCTGTCTTTTTTATGTATCTCACTCCTGAC | |
| AGATTTCCTGAGCTGAGTAAAGTGGCATCCTTATGTTACTCCCTAGTCACTCCCATGTTGA | |
| ATCCTTTGATTTACTCTCTGAGGAACAAAGATGTCCAAGAGGCTCTAAAAAAATTTCTAGA | |
| GAAGAAAAATATTATTCTTTGA | |
| AOLFR96 sequences: | |
| MICENHTRVTEFILLGFTNNPEMQVSLFIFFLAIYTVTLLGNFLIVTVTSVDLALQTPMYFFLQN | (SEQ ID NO: 179) |
| LSLLEVCFTLVMVPKMLVDLVSPRKIISEVGCGTQMYFFFFFGSSECFLLSMMAYDPSVAICNP | |
| LHYSVIMNRSLCLWMAIGSWMSGVPVSMLQTAWMMALPFCGPNAVDHFFCDGPPVLKLVTV | |
| DTTMYEMQALASTLLFIMFPFCLILVSYTRIIITILRMSSATGRQKAFSTCSSHLIVVSLFYGTASL | |
| TYLRPKSNQSPESKKLVSLSYTVITPMLNPIIYGLRNNEVKGAVKRTITQKVLQKLDVF | |
| ATGATCTGTGAAAATCACACCAGAGTCACTGAATTTATTCTTCTTGGTTTTACAAACAACC | (SEQ ID NO: 180) |
| CCGAGATGCAAGTTTCCCTCTTTATTTTTTTCCTGGCCATTTATACAGTCACTTTGTTGGGC | |
| AACTTTCTTATTGTCACAGTTACCAGTGTGGATCTCGCACTTCAAACACCCATGTACTTCTT | |
| TCTTCAAAATCTGTCACTTCTTGAAGTATGTTTCACCTTGGTTATGGTGCCAAAAATGCTTG | |
| TAGATCTAGTGTCCCCAAGGAAAATTATCTCTTTTGTGGGCTGTGGTACCCAGATGTACTT | |
| CTTCTTCTTCTTTGGCAGTTCTGAATGTTTCCTTCTCTCCATGATCGCTTATGATCGCTTTGT | |
| GGCCATCTGTAACCCTCTCCATTATTCAGTCATAATGAACAGGTCCCTATGCTTGTGGATG | |
| GCCATAGGCTCTTGGATGTCCGGTGTTCCTGTGTCTATGCTACAGACAGCTTGGATGATGG | |
| CCCTTCCTTTCTGTGGACCAAATGCCGTGGACCACTTTTTCTGTGATGGTCCCCCAGTGTTA | |
| AAACTAGTCACAGTGGATACAACCATGTATGAAATGCAAGCACTTGCCTCCACACTCCTGT | |
| TTATCATGTTTCCCTTTTGTCTCATTTTGGTTTCCTACACCCGCATTATCATAACAATTCTG | |
| AGGATGTCCTCTGCCACTGGCCGCCAGAAGGCATTTTCTACTTGTTCCTCACACCTCATTGT | |
| GGTGTCCCTCTTCTACGGAACAGCCAGTCTGACCTACCTGCGGCCCAAATCAAACCAGTCC | |
| CCTGAGAGCAAGAAGCTAGTGTCATTGTCCTACACTGTCATCACACCTATGCTAAACCCCA | |
| TCATCTACGGCCTGAGGAACAATGAAGTGAAAGGGGCTGTCAAGAGGACAATCACTCAAA | |
| AAGTCTTACAGAAGTTAGATGTGTTTTGA | |
| AOLFR97 sequences: | |
| MTEFHLQSQMPSIRLIFRRLSLGRIKPSQSPRCSTSFMVVPSFSIAEHWRRMKGANLSQGMEFEL | (SEQ ID NO: 181) |
| LGLTTDPQLQRLLFVVFLGMYTATLLGNLVMFLLIHVSATLHTPMYSLLKSLSFLDFCYSSTVV | |
| PQTLVNFLAKRKVISYFGCMTQMFFYAGFATSECYLIAMVIAYDRYAAICNPLLYSTIMSPEVC | |
| ASLIVGSYSAGFLNSLIHTGCIFSLKFCGAHVVTHFFCDGPPILSLSCVDTSLCEILLFIFAGFNLLS | |
| CTLTILISYFLILNTILKMSSAQGRFKAFSTCASHLTAICLFFGTTLFMYLRPRSSYSLTQDRTVA | |
| VIYTVVIPVLNPLMYSLRNKDVKKALIKVWGRKTME | |
| ATGACAGAGTTTCATCTGCAAAGCCAAATGCCCTCAATAAGACTCATCTTCAGAAGGCTGT | (SEQ ID NO: 182) |
| CCTTAGGCAGAATTAAACCCAGTCAGAGCCCCAGGTGTTCAACCTCATTTATGGTGGTGCC | |
| TTCTTTCTCCATCGCAGAGCACTGGAGAAGGATGAAAGGGGCAAACCTGAGCCAAGGGAT | |
| GGAGTTTGAGCTCTTGGGCCTCACCACTGACCCCCAGCTCCAGAGGCTGCTCTTCGTGGTG | |
| TTCCTGGGCATGTACACAGGCACTCTGCTGGGGAACCTGGTCATGTTCCTCCTGATCCATG | |
| TGAGTGCCACCCTGCACACACCCATGTACTCCCTCCTGAAGAGCCTCTCCTTCTTGGATTTC | |
| TGCTACTCCTCCACGGTTGTGCCCCAGACCCTGGTGAACTTCTTGGCCAAGAGGAAAGTGA | |
| TCTCTTATTTTGGCTGCATGACTGAGATGTTCTTCTATGCGGGTTTTGCCACCAGTGAGTGC | |
| TATCTCATCGCTGCCATGGCCTATGACCGCTATGCCGCTATTTGTAACCCCCTGCTCTACTG | |
| AACCATCATGTCTCCTGAGGTCTGTGCCTCGCTGATTGTGGGCTCCTACAGTGCAGGATTC | |
| CTCAATTCTCTTATCCACACTGGCTGTATCTTTAGTCTGAAATTCTGCGGTGCTCATGTCGT | |
| CACTCACTTGTTCTGTGATGGGCCACCCATCCTGTCCTTGTCTTGTGTAGACACCTCACTGT | |
| GTGAGATCCTGCTCTTCATTTTTGCTGGTTTCAACCFFTTGAGCTGCACCCTCACCATCTTG | |
| ATCTCCTACTTCTTAATTCTCAACACCATCCTGAAAATGAGCTCGGCCCAGGGCAGGTTTA | |
| AGGCATTTTCCACGTGTGCATCCCACCTCACTGCCATCTGCCTCTTCTTTGGCACAACACTT | |
| TTTATGTACGTGCGCCCCAGGTCCAGCTAGTCCTTGACCCAGGACCGCACAGTTGCTGTCA | |
| TCTACACAGTGGTGATCCCAGTGCTGAACCCCCTCATGTACTCTTTGAGAAACAAGGATGT | |
| GAAGAAAGCTTTAATAAAGGTTTGGGGTAGGAAAACAATGGAATGA | |
| AOLFR98 sequences: | |
| MRGFNKTTVVTQFILVGFSSLGELQLLLFVIFLLLYLTILVANVTIMAVIRFSWTLHTPMYGFLFI | (SEQ ID NO: 183) |
| LSFSESCYTFVIIPQLLVHLLSDTKTISFMACATQLFFFLGFACTNCLLIAVMGYDRYVAICHPLR | |
| YTLIINKRLGLELISLSGATGFFIALVATNLICDMRFCGPNRVNHYFCDMAPVIKLACTDTHVKE | |
| LALFSLSILVIMVPFLLILISYGFIVNTILKIPSAEGKKAFVTCASHLTVVFVHYGCASIIYLRPKSK | |
| SASDKDQLVAVTYTVVTPLLNPLVYSLRNKEVKTALKRVLGMPVATKMS | |
| ATGCGAGGTTTCAACAAAACCACTGTGGTTACACAGTTCATCCTGGTGGGTTTCTCCAGCC | (SEQ ID NO: 184) |
| TGGGGGAGCTCCAGCTGCTGCTTTTTGTCATCTTTCTTCTCCTATACTTGACAATCCTGGTG | |
| GCCAATGTGACCATCATGGCCGTTATTCGCTTCAGCTGGACTCTCCACACTCCCATGTATG | |
| GCTTTCTATTCATCCTTTCATTTTCTGAGTCCTGCTACACTTTTGTCATCATCCCTCAGCTGC | |
| TGGTCCACCTGCTCTCAGACACCAAGACCATCTCCTTCATGGCCTGTGCCACCCAGCTGTT | |
| CTTTTTCCTTGGCTTTGCTTGCACCAACTGCCTCCTCATTGCTGTGATGGGATATGATCGCT | |
| ATGTAGCAATTTGTCACCCTCTGAGGTACACACTCATCATAAACAAAAGGCTGGGGTTGGA | |
| GTTGATTTCTCTCTCAGGAGCCACAGGTTTCTTTATTGCTTTGGTGGCCACCAACCTCATTT | |
| GTGACATGCGTTTTTGTGGCCCCAAGAGGGTTAACCACTATTTCTGTGACATGGCACCTGT | |
| TATCAAGTTAGCCTGCACTGACACCCATGTGAAAGAGCTGGCTTTATTTAGCCTCAGCATC | |
| CTGGTAATTATGGTGCCTTTTCTGTTAATTCTCATATCCTATGGCTTCATAGTTAACACGAT | |
| CCTGAAGATCCCCTCAGCTGAGGGCAAGAAGGCCTTTGTCACCTGTGCCTCACATCTCACT | |
| GTGGTGTTTGTCCACTATGGCTGTGCCTCTATCATCTATCTGCGGCCCAAGTCCAAGTCTGC | |
| CTCAGACAAGGATCAGTTGGTGGCAGTGACCTAGACAGTGGTTACTCCCTTACTTAATCCT | |
| CTTGTCTACAGTCTGAGGAACAAAGAGGTAAAAACTGCATTGAAAAGAGTTCTTGGAATG | |
| CCTGTGGCAACCAAGATGAGCTAA | |
| AOLFR99 sequences: | |
| MERVNETVVREVIFLGFSSLARLQQLLFVIFLLLYLFTLGTNAIIISTIVLDRALHIPMYFFLAILSC | (SEQ ID NO: 185) |
| SEICYTFIIVPKMLVDLLSQKKTISFLGCAIQMFSFLFLGCSHSFLLAVMGYDRYIAICNPLRYSV | |
| LMGHGVCMGLVAAACACGFTVAQIITSLVFHLPFYSSNQLHHFFCDIAPVLKLASHHNIFSQIV | |
| IFMLCTLVLAIPLLLILVSYVHILSAILQFPSTLGRCKAFSTCVSHLIIVTVHYGCASFIYLRPQSNY | |
| SSSQDALISVSYTIITPLFNPMIYSLRNKEFKSALCKIVRRTISLL | |
| ATGGAGCGGGTCAATGAGACTGTGGTGAGAGAGGTCATCTTCCTCGGCTTCTCATCCCTGG | (SEQ ID NO: 186) |
| CCAGGCTGCAGGAGCTGCTCTTTG1TATCTTCCTGCTCCTCTACCTGTTCACTCTGGGCACC | |
| AATGCAATCATCATTTCCACCATTGTCCTGGACAGGGCCGTTCATATCCCCATGTACTTCTT | |
| CCTTGCCATCCTCTCTTGCTCTGAGATTTGCTACACCTTCATCATTGTACCCAAGATGCTGG | |
| TTGACCTGCTGTCCCAGAAGAAGACCATTTCTTTCCTGGGCTGTGCCATCCAAATGTTTTCC | |
| TTCCTCTTCCTTGGCTGCTCTCACTCCTTTCTGCTGGCAGTCATGGGTTATGATCGTTACAT | |
| AGCCATCTGTAACCCACTGCGCTACTCAGTGCTAATGGGACATGGGGTGTGTATGGGACTA | |
| GTGGCTGCTGCCTGTGCCTGTGGCTTCACTGTTGCACAGATCATCACATCCTTGGTATTTCA | |
| CCTGCCTTTTTATTCCTCCAATCAACTACATCACTTCTTCTGTGACATTGCTCCTGTCCTCA | |
| AGCTGGCATCTCACCATAACCACTTTAGTCAGATTGTCATCTTCATGCTCTGTACATTGGTC | |
| CTGGCTATCCCCTTATTGTTGATCTTGGTGTCCTATGTTCACATCCTCTCTGCCATACTTCA | |
| GTTTCCTTCCACACTGGGTAGGTGCAAAGCTTTTTCTACCTGTGTATCTCACCTCATTATTG | |
| TCACTGTCCACTATGGCTGTGCCTCCTTTATCTACTTAAGGCCTCAGTCCAACTACTCCTCA | |
| AGCCAGGATGCTCTAATATCAGTATCGTACACTATTATAACTCCATTGTTCAACCCAATGA | |
| TTTATAGCTTGAGAAATAAAGAGTTCAAATCAGCTCTTTGTAAAATTGTGAGAAGAACAAT | |
| TTCCCTGTTGTAA | |
| AOLFR101 sequences: | |
| MDTGNWSQVAEFIILGFPHLQGVQIYLFLLLLLIYLMTVLGNLLIFLVVCLDSRLHTPMYHFVSI | (SEQ ID NO: 187) |
| LSFSELGYTAATIPKMLANLLSEKKTISFSGCLLQIYFFHSLGATECYLLTAMAYDRYLAICRPL | |
| HYPTLMTPTLCAEIAIGCWLGGLAGPVVEISLISRLPFCGPNRIQHVFCDFPPVLSLACTDTSINV | |
| LVDFVINSCKILATFLLILCSYVQHCTVLRIPSAAGKRKAISTCASHFTVVLIFYGSILSMYVQLK | |
| KSYSLDYDQALAVVYSVLTPFLNPFIYSLRNKEIKEAVRRQLKRIGILA | |
| ATGGACACAGGGAACTGGAGCCAGGTAGCAGAATTCATCATCTTGGGCTTCCCCCATCTCC | (SEQ ID NO: 188) |
| AGGGTGTCCAGATTTATCTCTTCCTCTTGTTGCTTCTCATTTACCTCATGACTGTGTTGGGA | |
| AACCTGCTGATATTCCTGGTGGTCTGCCTGGACTCCCGGCTTCACACACCCATGTACCACT | |
| TTGTCAGCATTCTCTCCTTCTCAGAGCTTGGCTATACAGCTGCCACCATCCCTAAGATGCTG | |
| GCAAAGTTGCTCAGTGAGAAAAAGACCATTTCATTCTCTGGGTGTCTCCTGCAGATCTATT | |
| TCTTTCACTCCCTTGGAGCGACTGAGTGCTATCTCCTGAGAGCTATGGCCTACGATAGGTA | |
| TTAGCCATCTGCCGGCCCCTCCACTACCCAACCCTCATGACCCCAACACTTTGTGCAGAG | |
| ATTGCCATTGGCTGTTGGTTGGGAGGCTTGGCTGGGCCAGTAGTTGAAATTTCCTTGATTT | |
| CACGCCTCCCATTCTGTGGCCCCAATCGCATTCAGCACGTCTTTTGTGACTTCCCTCCTGTG | |
| CTGAGTTTGGCTTGCACTGATACGTCTATAAATGTCCTAGTAGATTTTGTTATAAATTCCTG | |
| CAAGATCCTAGCCACCTTCCTGCTGATCCTCTGCTCCTATGTGCAGATCATCTGCACAGTGC | |
| TCAGAATTCCCTCAGCTGCCGGCAAGAGGAAGGCCATCTCCACGTGTGCCTCCCACTTCAC | |
| TGTGGTTCTCATCTTCTATGGGAGCATCCTTTCCATGTATGTGCAGCTGAAGAAGAGCTAC | |
| TCACTGGACTATGACCAGGCCCTGGCAGTGGTCTACTCAGTGCTCACACCCTTCCTCAACC | |
| CCTTCATCTACAGCTTGCGCAACAAGGAGATCAAGGAGGCTGTGAGGAGGCAGCTAAAGA | |
| GAATTGGGATATTGGCATGA | |
| AOLFR102 sequences: | |
| MPVGKLVFNQSEPTEFVFRAFTTATEFQVLLFLLFLLLYLMILCGNTAIIWVVCTHSTLRTPMYF | (SEQ ID NO: 189) |
| FLSNLSFLELCYTTVVVPLMLSNILGAQKPISLAGCGAQMFFFVTLGSTDCFLLAIMAYDRYVAI | |
| CHPLHYTLIMTRELCTQMLGGALGLALFPSLQLTALIFTLPFCGHHQEINHFLCDVPPVLRLACA | |
| DIRVHQAVLYVVSILVLTIPFLLICVSYVFITCAILSIRSAEGRRRAFSTCSFHLTVVLLQYGCCSL | |
| VYLRPRSSTSEDEDSQIALVYTFVTPLLNPLLYSLRNKDVKGALRSAIIRKAASDAN | |
| ATGCCTGTGGGGAAACTTGTCTTCAACCAGTCTGAGCCCACTGAGTTTGTGTTCCGTGCGT | (SEQ ID NO: 190) |
| TCACCACAGCCACTGAATTCCAGGTTCTTCTCTTCCTTCTCTTCCTCCTCCTCTACTTGATG | |
| ATCCTCTGTGGCAACACAGCCATCATCTGGGTGGTGTGCACACACAGCACCCTCCGCACCC | |
| CGATGTATTTCTTCCTGTCCAACCTGTCTTTCCTGGAACTCTGCTACACCACCGTGGTAGTA | |
| CCCTTGATGCTTTCCAACATTTTGGGGGCCCAGAAGCCCATTTCGTTGGCTGGATGTGGGG | |
| CCCAAATGTTCTTCTTTGTCACCCTCGGCAGCACGGACTGTTTCCTCTTGGCGATCATGGCC | |
| TATGACCGCTATGTGGCTATCTGCCACCCGCTGCACTACACCCTCATCATGACCCGCGAGC | |
| TGTGCACGCAGATGCTGGGTGGGGCCCTGGGCCTGGCCCTCTTCCCCTCCCTGCAGCTCAC | |
| CGCCTTAATCTTCACCCTGCCCTTTTGCGGCCACCACCAGGAAATCAACCACTTCCTCTGCG | |
| ATGTGCCTCCCGTCCTGCGCCTGGCCTGCGCTGACATCCGCGTGCACCAGGCTGTCCTCTA | |
| TGTCGTGAGCATCCTCGTGCTGACCATCCCCTTCCTGCTCATCTGCGTCTCCTACGTGTTCA | |
| TCACCTGTGCCATCCTGAGCATCCGTTCTGCCGAGGGCCGCCGCCGGGCCTTCTCCACCTG | |
| CTCCTTCCACCTCACCGTGGTCCTGCTGCAGTATGGCTGCTGCAGCCTCGTGTACCTGCGTC | |
| CTCGGTCCAGCACCTCAGAGGATGAGGACAGCCAAATCGCGTTGGTCTACACCTTTGTCAC | |
| CCCCTTACTCAACCCTTTGCTTTACAGCCTTAGGAACAAGGATGTCAAAGGTGCTCTGAGG | |
| AGTGCCATTATCCGTAAAGCAGCCTCTGACGCCAACTGA | |
| AOLFR103 sequences: | |
| MAEMNLTLVTEFLLIAFTEYPEWALPLFLLLLFMYLITVLGNLEMIILILMDHQLHAPMYFLLSH | (SEQ ID NO: 191) |
| LAFMDVCYSSITVPQMLAVLLEHGAALSYTRCAAQFFLFTFFGSIDCYLLALMAYDRYLAVCQ | |
| PLLYVTILTQQARLSLVAGAYVAGLISALVRTVSAFTLSFCGTSEIDFIFCDLPPLLKLTCGESYT | |
| QEVLIIMIFAIFVIPASMVVILVSYLFIIVAIMGIPAGSQAKTFSTCTSHLTAVSLFFGTLWMYLRG | |
| NSDQSSEKNRVVSVLYTEVIPMLNPLIYSLRNKEVKEALRKILNRAKLS | |
| ATGGCAGAGATGAACCTCACCTTGGTGACCGAGTTCCTCCTTATTGCATTCACTGAATATC | (SEQ ID NO: 192) |
| CTGAATGGGCACTCCCTCTCTTCCTCTTGTTATTATTTATGTATCTCATCACCGTATTGGGG | |
| AACTTAGAGATGATTATTCTGATCCTCATGGATCACCAGCTCCACGCTCCAATGTATTTCCT | |
| TCTGAGTCACCTCGCTTTCATGGACGTCTGCTACTCATCTATCACTGTCCCCCAGATGCTGG | |
| CAGTGCTGCTGGAGCATGGGGCAGCTTTATCTTACACACGCTGTGCTGCTCAGTTCTTTCT | |
| GTTCACCTTCTTTGGTTCCATCGACTGCTACCTCTTGGCCGTCATGGCCTATGACCGCTACT | |
| TGGCTGTGTGCCAGCCCCTGCTTTATGTCACGATCCTGACACAGCAGGCCCGCTTGAGTCT | |
| TGTGGCTGGGGCTTACGTTGCTGGTCTCATCAGTGCCTTGGTGCGGACAGTCTCAGCCTTC | |
| ACTCTCTCCTTCTGTGGAACCAGTGAGATTGACTTTATTTTCTGTGACCTCCCTCCTCTGTT | |
| AAAGTTGACCTGTGGGGAGAGCTACACTCAAGAAGTGCTGATTATTATGTTTGCCATTTTT | |
| GTCATCCCTGCTTCCATGGTGGTGATCTTGGTGTCCTACCTGTTTATCATCGTGGCCATCAT | |
| GGGGATCCCTGCTGGAAGCCAGGCCAAGACCTTCTCCACCTGCACCTCCCACCTCACTGCT | |
| GTGTCACTCTTCTTTGGTACCCTCATCTTCATGTACTTGAGAGGTAACTCAGATCAGTCTTC | |
| GGAGAAGAATCGGGTAGTGTCTGTGCTTTACACAGAGGTCATCCCCATGTTGAATCCCCTC | |
| ATCTACAGCCTGAGGAACAAGGAAGTGAAGGAGGCCCTGAGAAAAATTCTCAATAGAGCC | |
| AAGTTGTCCTAA | |
| AOLFR105 sequences: | |
| MQGLNHTSVSEFILVGFSAFPHLQLMLFLLFLLMYLFTLLGNLLIMATVWSERSLHMPMYLFLC | (SEQ ID NO: 193) |
| ALSITEILYTVAIIPRMLADLLSTQRSIAFLACASQMFFSFSFGFTHSFLLTVMGYDRYVAICHPL | |
| RYNVLMSLRGCTCRVGCSWAGGLVMGMVVTSAIFHLAFCGHKEIHHFFCHVPPLLKLACGDD | |
| VLVVAKGVGLVCITALLGCFLLILLSYAFIVAAILKIPSAEGRNKAFSTCASHLTVVVVHYGFAS | |
| VIYLKPKGPQSPEGDTLMGITYTVLTPFLSPIIFSLRNKELKVAMKKTCFTKIFPQNC | |
| ATGCAGGGGCTAAACCACACCTCCGTGTCTGAATTCATCCTCGTTGGCTTCTCTGCCTTCCC | (SEQ ID NO: 194) |
| CCACCTCCAGCTGATGCTCTTCCTGCTGTTCCTGCTGATGTACCTGTTCACGCTGCTGGGGA | |
| ACCTGCTCATCATGGCCACTGTCTGGAGCGAGCGCAGCCTCCACATGCCCATGTACCTCTT | |
| CCTGTGTGCCCTCTCCATCACCGAGATCCTCTACACCGTGGCCATCATCCCGCGCATGCTG | |
| GCCGACCTGCTGTCCACCGAGCGCTCCATCGCCTTCCTGGCCTGTGCCAGTCAGATGTTCTT | |
| CTCCTTCAGCTTCGGCTTCACCCACTCCTTCCTGCTCACTGTCATGGGCTACGACCGCTACG | |
| TGGCCATCTGCCACCCGCTGCGTTAGAAGGTGCTCATGAGCCTGCGGGGCTGCACCTGCCG | |
| GGTGGGCTGCTCCTGGGCTGGTGGCTTGGTCATGGGGATGGTGGTGACCTCGC3CCATTTTC | |
| CACCTCGCCTTCTGTGGACACAAGGAGATCCACCATTTCTTCTGCCACGTGCCACCTCTGTT | |
| GAAGTTGGCCTGTGGAGATGATGTGCTGGTGGTGGCCAAAGGCGTGGGCTTGGTGTGTAT | |
| CACGGCCCTGCTGGGCTGTTTTCTCCTCATCCTCCTCTCCTATGCCTTCATCGTGGCCGCCA | |
| TCTTGAAGATCCCTTCTGCTGAAGGTCGGAACAAGGCCTTCTCCACCTGTGCCTCTCACCT | |
| CACTGTGGTGGTCGTGCACTATGGCTTTGCCTCCGTCATTTACCTGAAGCCCAAAGGTCCC | |
| CAGTCTCCGGAAGGAGACACCTTGATGGGCATCACCTACACGGTCCTCACACCCTTCCTCA | |
| GCCCCATCATCTTCAGCCTCAGGAACAAGGAGCTGAAGGTCGCCATGAAGAAGACTTGCTT | |
| CACCAAACTCTTTCCACAGAACTGCTGA | |
| AOLFR106 sequences: | |
| METANYTKVTEFVLTGLSQTPEVQLVLFVIFLSFYLFILPGMLIICTISLDPHLTSPMYFLLANLA | (SEQ ID NO: 195) |
| FLDIWYSSITAPEMLIDFFVERKIISFDGCIAQLFFLHFAGASEMFLLTVMAYDLYTAICPYLHYA | |
| TIMNQRLCCILVALSWRGGFIHSHQVALIVRLPFCGPNELDSYFCDITQVVRIACANTFPEELVM | |
| ICSSGLISVVCLIALLMSYAFLLALFKKLSGSGENTNRAMSTCYSHITIVVLMFGPSIYIYARPFD | |
| SFSLDKVVSVFNTLIFPLRNPIIYTLRNKEVKAAMRKIVTKYILCKEK | |
| ATGGAAACTGCAAATTACACCAAGGTGACAGAATTTGTTCTCACTGGCCTATCCGAGACTC | (SEQ ID NO: 196) |
| CAGAGGTCCAACTAGTCCTATTTGTTATATTTCTATCCTTCTATTTGTTCATCCTACCAGGA | |
| AATATCCTTATCATTTGCACCATCAGTCTAGACCCTCATCTGACCTCTCCTATGTATTTCCT | |
| GTTGGCTAATCTGGCCTTCCTTGATATTTGGTACTCTTCCATTACAGCCCCTGAAATGCTCA | |
| TAGACTTCTTTGTGGAGAGGAAGATAATTTCTTTTGATGGATGCATTGCACAGCTCTTCTT | |
| CTTACACTTTGCTGGGGCTTCGGAGATGTTCTTGCTCACAGTGATGGCCTTTGACCTCTACA | |
| CTGCTATCTGCCGACCCCTCCACTATGCTACCATCATGAATCAACGTCTCTGCTGTATCCTG | |
| GTGGCTGTCTCCTGGAGGGGGGGCTTCATTCATTCTATCATACAGGTGGCTCTCATTGTTC | |
| GACTTCCTTTCTGTGGGCCCAATGAGTTAGACAGTTACTTCTGTGACATCACACAGGTTGT | |
| CCGGATTGCCTGTGCCAACACCTTCCCAGAGGAGTTAGTGATGATCTGTAGTAGTGGTCTG | |
| ATCTCTGTGGTGTGTTTGATTGCTCTGTTAATGTCCTATGCCTTCCTTCTGGCCTTGTTCAA | |
| GAAACTTTCAGGCTCAGGTGAGAATACCAACAGGGCCATGTCCACCTGCTATTCCCACATT | |
| ACCATTGTGGTGCTAATGTTTGGGCCATCCATCTACATTTATGCTCGCCCATTTGACTCGTT | |
| TTCCCTAGATAAAGTGGTGTCTGTGTTCAATACTTTAATATTCCCTTTACGTAATCCCATTA | |
| TTTACACATTGAGAAACAAGGAAGTAAAGGCAGCCATGAGGAAGTTGGTCACCAAATATA | |
| TTTTGTGTAAAGAGAAGTGA | |
| AOLFR107 sequences: | |
| MELWNFTLGSGFILVGILNDSGSPELLCATITILYLLALISNGLLLLAITMEARLHMPMYLLLGQ | (SEQ ID NO: 197) |
| LSLMDLLFTSVVTPKALADFLRRENTISFGGCALQMFLALTMGGAEDLLLAFMAYDRYVAICH | |
| PLTYMTLMSSRACWLMVATSWILASLSALIYTVYTMHYPFCRAQEIRHLLCEIPHLLKVACAD | |
| TSRYELMVYVMGVTFLIPSLAAILASYTQILLTVLHMPSNEGRKKALVTCSSHLTVVGMFYGA | |
| ATFMYVLPSSFHSTRQDNIISVFYTIVTPALNPLIYSLRNKEVMRALRRVLGKYMLPAHSTL | |
| ATGGAGCTCTGGAACTTCACCTTGGGAAGTGGCTTCATTTTGGTGGGGATTCTGAATGACA | (SEQ ID NO: 198) |
| GTGGGTCTCCTGAACTGCTCTGTGCTACAATTACAATCCTATACTTGTTGGCCCTGATCAG | |
| CAATGGCCTACTGCTCCTGGCTATCACCATGGAAGCCCGGCTCCACATGCCCATGTACCTC | |
| CTGCTTGGGCAGCTCTCTCTCATGGACCTCCTGTTCACATCTGTTGTCACTCCCAAGGCCCT | |
| TGCGGACTTTCTGCGCAGAGAAAACACCATCTCCTTTGGAGGCTGTGCCCTTCAGATGTTC | |
| CTGGCACTGACAATGGGTGGTGCTGAGGACCTCCTACTGGCCTTCATGGCCTATGACAGGT | |
| ATGTGGCCATTTGTCATCCTCTGACATACATGACCCTCATGAGCTCAAGAGCCTGCTGGCT | |
| CATGGTGGCCACGTCCTGGATCCTGGCATCCCTAAGTGCCCTAATATATACCGTGTATACC | |
| ATGCACTATGCCTTCTGCAGGGCCCAGGAGATCAGGCATCTTGTCTGTGAGATCCCACACT | |
| TGCTGAAGGTGGCGTGTGCTGATACCTCCAGATATGAGCTCATGGTATATGTGATGGGTGT | |
| GACCTTCCTGATTCCCTCTCTTGCTGCTATACTGGCCTCCTATACACAAATTCTACTCACTG | |
| TGCTCCATATGCCATCAAATGAGGGGAGGAAGAAAGCCCTTGTCACCTGCTCTTCCCACCT | |
| GACTGTGGTTGGGATGTTCTATGGAGCTGCCACATTCATGTATGTCTTGCCCAGTTCCTTCC | |
| ACAGCACCAGACAAGACAACATCATCTCTGTTTTCTACACAATTGTCACTCCAGCCCTGAA | |
| TCCACTCATCTACAGCCTGAGGAATAAGGAGGTCATGCGGGCCTTGAGGAGGGTCCTGGG | |
| AAAATACATGCTGCCAGCACACTCCACGCTCTAG | |
| AOLFR108 sequences: | |
| MCSFFLCQTGKQAKISMGEENQTFVSKFIFLGLSQDLQTQILLFILFLIIYLLTVLGNQLIIILIFLD | (SEQ ID NO: 199) |
| SRLHTPMYFFLRNLSFADLCFSTSIVPQVLVHFLVKRKTISFYGCMTQIIVFLLVGCTECALLAV | |
| MSYDRYVAVCKPLYYSTIMTQRVCLWLSFRSWASGALVSLVDTSFTFHLPYWGQNIINHYFCE | |
| PPALLKLASIDTYSTEMAIFSMGVVILLAPVSLILGSYWNIISTVIQMQSGEGRIKAFSTCGSHLI | |
| VVVLFYGSGIFTYMRPNSKTTKELDKMISVFYTAVTPMLNPIIYSLRNKDVKGALRKLVGRKC | |
| FSHRQ | |
| ATGTGTTCTTTTTTCTTGTGCCAAACAGGTAAACAGGCAAAAATATCAATGGGAGAAGAAA | (SEQ ID NO: 200) |
| ACCAAACCTTTGTGTCCAAGTTTATCTTCCTGGGTCTTTCACAGGACTTGCAGACCCAGAT | |
| CCTGCTATTTATCCTTTTCCTCATCATTTATCTGCTGACCGTGCTTGGAAAGCAGCTCATCA | |
| TCATTCTCATCTTCCTGGATTCTCGCCTTCACACTCCCATGTATTTTTTTCTTAGAAATCTCT | |
| CCTTTGCAGATCTCTGTTTCTCTACTAGCATTGTCCCTCAAGTGTTGGTTCACTTCTTGGTA | |
| AAGAGGAAAACCATTTCTTTTTATGGGTGTATGACACAGATAATTGTCTTTCTTCTGGTTG | |
| GGTGTACAGAGTGTGCGCTGCTGGCAGTGATGTCCTATGACCGGTATGTGGCTGTCTGCAA | |
| GCCCCTGTACTACTCTACCATCATGACACAACGGGTGTGTCTCTGGCTGTCCTTCAGGTCCT | |
| GGGCCAGTGGGGCACTAGTGTCTTTAGTAGATACCAGCTTTACTTTCCATCTTCCCTACTG | |
| GGGAGAGAATATAATCAATCACTACTTTTGTGAACCTCCTGCCCTCCTGAAGCTGGCTTCC | |
| ATAGACACTTACAGCACAGAAATGGCCATCTTTTCAATGGGCGTGGTAATCCTCCTGGCCC | |
| CTGTCTCCCTGATTCTTGGTTCTTATTGGAATATTATCTCCACTGTTATCCAGATGCAGTCT | |
| GGGGAAGGGAGACTCAAGGCTTTTTCCACCTGTGGCTCCCATCTTATTGTTGTTGTCCTCTT | |
| CTATGGGTCAGGAATATTCACCTACATGCGACGAAACTCCAAGACTACAAAAGAACTGGA | |
| TAAAATGATATCTGTGTTCTATACAGCGGTGACTCCAATGTTGAACCCCATAATTTATAGC | |
| TTGAGGAACAAAGATGTCAAAGGGGCTCTCAGGAAACTAGTTGGGAGAAAGTGCTTGTCT | |
| CATAGGCAGTGA | |
| AOLFR109 sequences: | |
| MLRNGSIVTEFILVGFQQSSTSTRALLFALFLALYSLTMAMNGLIIFITSWTDPKLNSPMYFFLG | (SEQ ID NO: 201) |
| HLSLLDVCFITTTIPQMLIHLVVRDHIVSFVCCMTQMYFVFCVGVAECILLAFMAYDRYVAICY | |
| PLNYVPIISQKVCVRLVGTAWFFGLINGIFLEYISFREPFRRDNHIESFFCEAPIVIGLSCGDPQFSL | |
| WAIFADAIVVILSPMVLTVTSYVHILATILSKASSSGRGKTFSTCASHLTVVIFLYTSAMFSYMN | |
| PHSTHGPDKDKPFSLLYTIITPMCNPIIYSFRNKEIKEAMVRALGRTRIAQPQSV | |
| ATGCTAAGGAATGGCAGCATAGTGACGGAATTTATCCTCGTGGGCTTTCAGCAGAGCTCCA | (SEQ ID NO: 202) |
| CTTCCACACGAGCATTGCTCTTTGCCCTCTTCTTGGCCCTCTACAGCCTCACCATGGCCATG | |
| AATGGCCTCATCATGTTTATCACCTCCTGGACAGACCCCAAGCTCAACAGCCCCATGTACT | |
| TCTTCCTCGGCCATCTGTCTCTCCTGGATGTCTGCTTCATCACCACTACCATCCCACAGATG | |
| TTGATCCACCTCGTGGTCAGGGACCACATTGTCTCCTTTGTATGTTGCATGACCCAGATGT | |
| ACTTTGTCTTCTGTGTTGGTGTGGCCGAGTGCATCCTCTTGGCTTTCATGGCCTATGACCGT | |
| TATGTTGCTATCTGCTACCCACTTAACTATGTCCCGATCATAAGCCAGAAGGTCTGTGTCA | |
| GGCTTGTGGGAACTGCCTGGTTCTTTGGGCTGATCAATGGCATCTTTCTCGAGTATATTTC | |
| ATTCCGAGAGCCCTTCCGCAGAGACAACCACATAGAAAGCTTCTTCTGTGAGGCCCCCATA | |
| GTGATTGGCCTCTCTTGTGGGGACCCTCAGTTTAGTCTGTGGGCAATCTTTGCCGATGCCA | |
| TCGTGGTAATTCTCAGCCCCATGGTGCTCACTGTCACTTCCTATGTGCACATCCTGGCCACC | |
| ATCCTCAGCAAAGCCTCCTCCTCAGGTCGGGGGAAGACTTTCTCTACTTGTGCCTCTCACC | |
| TGACTGTGGTCATCTTTCTCTACACTTCAGCTATGTTCTCTTACATGAACCCCCACAGCACA | |
| CATGGGCCTGACAAAGACAAACCTTTCTCCCTCCTGTACACCATCATTACCCCCATGTGCA | |
| ACCCCATCATTTATAGTTTCCGCAACAAGGAAATTAAGGAGGCCATGGTGAGGGCACTTG | |
| GAAGAACCAGGCTGGCCCAGGCACAGTCTGTCTAG | |
| AOLFR110 sequences: | |
| MKIANNTVVTEFILLGLTQSQDIQLLVFVLILIFYLIILPGNFLIIFTIRSDPGLTAPLYLFLGNLAFL | (SEQ ID NO: 203) |
| DASYSFIVAPRMLVDFLSEKKVISYRGCITQLFFLHFLGGGEGLLLVVMAFDRYIAICRPLHCST | |
| VMNPRACYAMMLALWLGGFVHSIIQVVLILRLPFCGPNQLDNFFCDVRQVIKLACTDMFVVEL | |
| LMVFNSGLMTLLCFLGLLASYAVILCHVRRAASEGKNKAAMSTCTTRVIIILLMFGPAIFIYMCPF | |
| RALPADKMVSLFHTVIFPLMNPMIYTLRNQEVKTSMKRLLSRRVVCQVDFIIRN | |
| ATGAAGATAGCAAACAACACAGTAGTGACAGAATTTATCCTCCTTGGTCTGACTCAGTCTC | (SEQ ID NO: 204) |
| AAGATATTCAGCTCTTGGTCTTTGTGCTGATCTTAATTTTCTACCTTATCATCCTCCCTGGA | |
| AATTTTCTCATTATTTTCACCATAAGGTCAGACCCTGGGCTCACAGCCCCCCTCTATTATT | |
| TCTGGGCAACTTGGCCTTCCTGGATGCATCCTACTCCTTCATTGTGGCTCCCAGGATGTTGG | |
| TGGACTTCCTCTCTGAGAAAAAGGTAATCTCCTACAGAGGCTGCATCACTCAGCTCTTTTT | |
| CTTGCACTTCCTTGGAGGAGGGGAGGGATTACTCCTTGTTGTGATGGCCTTTGACCGCTAC | |
| ATCGCCATCTGCCGGCCTCTGCACTGTTCAACTGTCATGAACCCTAGAGCCTGCTATGCAA | |
| TGATGTTGGCTCTGTGGCTTGGGGGTTTTGTCCACTCCATTATCCAGGTGGTCCTCATCCTC | |
| CGCTTGCCTTTTTGTGGCCCAAACCAGCTGGACAACTTCTTCTGTGATGTCCGACAGGTCA | |
| TCAAGCTGGCTTGCACCGACATGTTTGTGGTGGAGCTTCTAATGGTCTTCAACAGTGGCCT | |
| GATGACACTCCTGTGCTTTCTGGGGCTTCTGGCTTCCTATGCAGTCATCGTCTGCCATGTTC | |
| GTAGGGCAGCTTCTGAAGGGAAGAACAAGGCCATGTCCACGTGCACCACTCGTGTCATTA | |
| TTATACTTCTTATGTTTGGACCTGCTATCTTCATCTACATGTGCCCTTTCAGGGCCTTACCA | |
| GCTGACAAGATGGTTTCTCTCTTTCACACAGTGATCTTTCCATTGATGAATCCTATGATTTA | |
| TACCCTTCGCAACCAGGAAGTGAAAACTTCCATGAAGAGGTTATTGAGTCGACATGTAGTC | |
| TGTCAAGTGGATTTTATAATAAGAAACTGA | |
| AOLFR111 sequences: | |
| MCYIYLIFKEWTLIFYFSLLLFLQITPAIMANLTIVTEFILMGFSTNKNMCILHSILFLLIYLCALM | (SEQ ID NO: 205) |
| GNVLIIMITTLDHHLHTPVYFFLKNLSFLDLCLISVTAPKSIANSLIHNNSISFLGCVSQVFLLLSS | |
| ASAELLLLTVMSFDRYTAICHPLHYDVIMDRSTCVQRATVSWLYGGLIAVMHTAGTFSLSYCG | |
| SNMVHQFFCDIPQLLAISCSENLIREIALILINVVLDFCCFIVIIITYVHVFSTVKKIPSTEGQSKAY | |
| SICLPHLLVVLFLSTGFIAYLKPASESPSILDAVISVFYTMLPPTFNPIIYSLRNKAIKVALGMLIKG | |
| KLTKK | |
| ATGTGTTATATATATTTAATATTTAAAGAGTGGACATTGATATTTTACTTCAGTCTTCTCCT | (SEQ ID NO: 206) |
| TTTGCTGCAGATTACTCCTGCAATAATGGCAAATCTCACAATCGTGACTGAATTTATCCTTA | |
| TGGGGTTTTCTACCAATAAAAATATGTGCATTTTGCATTCGATTCTCTTCTTGTTGATTTAT | |
| TTGTGTGCCCTGATGGGGAATGTCCTCATTATCATGATCACAACTTTGGACCATCATCTCC | |
| ACACCCCCGTGTATTTCTTCTTGAAGAATCTATCTTTCTTGGATCTGTGCCTTATTTCAGTC | |
| ACGGCTCCCAAATCTATCGCCAATTCTTTGATACACAACAACTCCATTTCATTCCTTGGCTG | |
| TGTTTCCCAGGTCTTTTTGTTGCTTTCTTCAGCATCTGCAGAGCTGCTCCTCCTCACGGTGA | |
| TGTCCTTTGACCGCTATACTGCTATATGTCACCCTCTGCACTATGATGTCATCATGGACAGG | |
| AGCACCTGTGTCCAAAGAGCCACTGTGTCTTGGCTGTATGGGGGTCTGATTGGTGTGATGC | |
| ACACAGCTGGCACCTTCTCCTTATCCTACTGTGGGTCCAAGATGGTCCATCAGTTCTTCTGT | |
| GACATTCCCCAGTTATTAGCTATTTCTTGCTCAGAAAATTTAATAAGAGAAATTGCACTCA | |
| TCCTTATTAATGTAGTTTTGGATTTCTGCTGTTTTATTGTCATCATCATTACCTATGTCCAC | |
| GTCTTCTCTACAGTCAAGAAGATCCCTTCCACAGAAGGCCAGTCAAAAGCCTACTCTATTT | |
| GCCTTCCACACTTGCTGGTTGTGTTATTTCTTTCCACTGGATTCATTGCTTATCTGAAGCCA | |
| GCTTCAGAGTCTCCTTCTATTTTGGATGCTGTAATTTCTGTGTTCTACACTATGCTGCCCCC | |
| AACCTTTAATCCCATTATATACAGTTTGAGAAACAAGGCCATAAAGGTGGCTCTGGGGATG | |
| TTGATAAAGGGAAAGCTCACCAAAAAGTAA | |
| AOLFR113 sequences: | |
| MKFWHGFSSHLNPMFSSFLLYLSLPWINTTIQAWLNLCSLALPVWAMSGAGFLSCCYWHTCSP | (SEQ ID NO: 207) |
| SVVTCSSSQSSDWMQLCTHLCTTLSVFFPSWSCGIQLPLSLRCCLIFSVRRKYFLLQDASFRPTSS | |
| TPWGACECYLLTAMAYDRYLAICRPLHYPIIMTTTLCAKMAAACWTCGFLCPISEVILASQLPF | |
| CAYNEIQHIFCDFPPLLSLACKDTSANILVDFAINAFIILITFFFIMISYARIIGAVLKIKTASGRKK | |
| AFSTCASHLAVVLIFFGSIIFMYVRLKKSYSLTLDRTLAIVYSVLTPMVNPIIYSLRNKEIIKAIKR | |
| TIFQKGDKASLAHL | |
| ATGTGTCAACAAATCTTACGGGATTGCATTCTTCTCATACATCATTTGTGCATTAACAGGA | (SEQ ID NO: 208) |
| AAAAAGTCTCACTTGTGATGCTGGGTCCAGCTTATAACCACACAATGGAAACCCCTGCCTC | |
| CTTCCTCCTTGTGGGTATCCCAGGACTGCAATCTTCACATCTTTGGCTGGCTATCTCACTGA | |
| GTGCCATGTACATCATAGCCCTGTTAGGAAACACCATCATCGTGACTGCAATCTGGATGGA | |
| TTCCACTCGGCATGAGCCCATGTATTGCTTTCTGTGTGTTCTGGCTGCTGTGGACATTGTTA | |
| TGGCCTCCTCGGTGGTACCCAAGATGGTGAGCATCTTCTGCTCAGGAGACAGCTCAATCAG | |
| CTTTAGTGCTTGTTTCACTCAGATGTTTTTTGTCCACTTAGCCACAGCTGTGGAGACGGGG | |
| CTGCTGCTGACCATGGCTTTTGACCGCTATGTAGCCATCTGCAAGCCTCTACACTACAAGA | |
| GAATTCTCACGCCTCAAGTGATGCTGGGAATGAGTATGGCCATCACCATCAGAGCTATCAT | |
| AGCCATAACTCCACTGAGTTGGATGGTGAGTCATCTACGTTTCTGTGGCTCCAATGTGGTT | |
| GTCCACTCCTACTGTGAGCACATAGCTTTGGCCAGGTTAGCATGTGCTGACCCCGTGCCCA | |
| GCAGTCTCTACAGTCTGATTGGTTCCTCTCTTATGGTGGGCTCTGATGTGGCCTTCATTGCT | |
| GCCTCCTATATCTTAATTCTCAAGGCAGTATTTGGTCTCTCCTCAAAGACTGCTCAGTTGAA | |
| AGCATTAAGCACATGTGGCTCCCATGTGGGGGTTATGGCTTTGTACTATCTACCTGGGATG | |
| GCATCCATCTATGCGGCCTGGTTGGGGCAGGATGTAGTGCCCTTGCACACCCAAGTCCTGC | |
| TAGCTGACCTGTACGTGATCATCCCAGCCACCTTAAATCCCATCATCTATGGCATGAGGAC | |
| CAAACAACTGCGGGAGAGATATGGAGTTATCTGATGCATGTCCTCTTTGACCATTCCAAC | |
| CTGGGTTCATGA | |
| AOLFR114 sequences: | |
| MERINHTSSVSEFILLGLSSRPEDQKTLFVLFLIVYLVTITGNLLIILAIRFNPHLQTPMYFFLSFLS | (SEQ ID NO: 209) |
| LTDICFTTSVVPKMLMNFLSEKKTISYAGCLTQMYFLYALGNSDSCLLAVMAFDRYVAVCDPF | |
| HYVTTMSHHHCVLLVAFSCSFPHLHSLLHTLLLNRLTFCDSNVIHHFLCDLSPVLKLSCSSIFVN | |
| EIVQMTEAPIVLVTRFLCIAFSYIRILTTVLKIPSTSGKRKAFSTCGFYLTVVTLFYGSIFCVYLQP | |
| PSTYAVKDHVATIVYTVLSSMLNPFIYSLRNKDLKQGLRKLMSKRS | |
| ATGGAAAGAATCAACCACACCAGCAGTGTCTGCGAGTTTATCCTCCTGGGACTCTCCTCCC | (SEQ ID NO: 210) |
| GGCCTGAGGACCAAAAGACACTCTTTGTTCTCTTCCTCATCGTGTACCTGGTCACCATAAC | |
| AGGGAACCTGCTCATCATCCTGGCCATTCGCTTCAACCCCCATCTTCAGACCCCTATGTATT | |
| TCTTCTTGAGTTTTCTGTCTCTCACTGATATTTGCTTTACAACAAGCGTTGTCCCCAAGATG | |
| CTGATGAACTTCCTGTCAGAAAAGAAGACCATCTCCTATGCTGGGTGTCTGAGACAGATGT | |
| ATTTTCTCTATGCCTTGGGCAACAGTGACAGCTGCCTTCTGGCAGTCATGGCCTTTGACCG | |
| CTATGTGGCCGTCTGTGACCCTTTCCACTATGTCACCACCATGAGCCACCACCACTGTGTCC | |
| TGCTGGTGGCCTTCTCCTGCTCATTTCCTCACCTCCACTCACTCCTGCACACACTTCTGCTG | |
| AATCGTCTCACCTTCTGTGACTCCAATGTTATCCACCACTTTCTCTGTGACCTCAGCCCTGT | |
| GCTGAAATTGTCCTGCTCTTCCATATTTGTCAATGAAATTGTGCAGATGACAGAAGCACCT | |
| ATTGTTTTGGTGACTCGTTTTCTCTGCATTGGTTTCTCTTATATACGAATCCTCACTACAGT | |
| TCTCAAGATTCCCTCTACTTCTGGGAAACGCAAAGCCTTCTCCACCTGTGGTTTTTACGTCA | |
| CCGTGGTGACGCTCTTTTATGGAAGCATCTTCTGTGTCTATTTACAGCCCCGATCCACCTAC | |
| GCTGTCAAGGACCACGTGGCAAGAATTGTTTACACAGTTTTGTCATGCATGCTCAATCCTT | |
| TTATCTACAGCCTGAGAAACAAAGACCTGAAACAGGGCCTGAGGAAGCTTATGAGCAAGA | |
| GATCCTAG | |
| AOLFR115 sequences: | |
| MEGFYLRRSHELQGMGKPGRVNQTTVSDFLLLGLSEWPEEQPLLFGIFLGMYLVTMVGNLLII | (SEQ ID NO: 211) |
| LAISSDPHLHTPMYFFLANLSLTDACFTSASIPKIMLANIHTQSQIISYSGCLAQLYFLLMFGGLD | |
| NCLLAVMAYDRYVAICQPLHYSTSMSPQLCALMLGVCWVLTNCPALMHTLLLTRVAFCAQK | |
| AIPHFYCDPSALLKLACSDTHVNELMIITMGLLFLTVPLLLIVFSYVRIFWAVFVISSPGGRWKA | |
| FSTCGSHLTVVLLFYGSLMGVYLLPPSTYSTERESRAAVLYMVIIPTLNPFIYSLRNRDMKEALG | |
| KLFVSGKTFFL | |
| ATGGAAGGTTTTTATCTGCGCAGATCACACGAACTACAAGGGATGGGAAAACCAGGCAGA | (SEQ ID NO: 212) |
| GTGAACCAAACCACTGTTTCAGACTTCCTCCTTCTAGGACTCTCTGAGTGGCCAGAGGAGC | |
| AGCCTCTTCTGTTTGGCATCTTCCTTGGCATGTAGCTGGTCACCATGGTGGGGAACCTGCTC | |
| ATTATCCTGGCCATCAGCTCTGACCCACACCTCCATACTCCCATGTACTTCTTTCTGGCCAA | |
| CCTGTCATTAACTGATGCCTGTTTCACTTCTGCCTCCATCCCCAAATGCTGGCCAACATTC | |
| ATACCCAGAGTCAGATCATCTCGTATTCTGGGTGTCTTGCACAGGTATATTTCCTCCTTATG | |
| TTTGGTGGCCTTGACAACTGCCTGCTGGCTGTGATGGCATATGACCGCTATGTGGCCATCT | |
| GCCAACCACTCCATTACAGCACATCTATGAGTCCCCAGCTCTGTGCACTAATGCTGGGTGT | |
| GTGCTGGGTGCTAACCAACTGTCCTGCGGTGATGCACACACTGTTGCTGACCCGCGTGGCT | |
| TTCTGTGCCCAGAAAGCCATCCCTCATTTCTATTGTGATCCTAGTGCTCTCGTGAAGCTTGC | |
| CTGCTCAGATACCCATGTAAACGAGCTGATGATCATCACCATGGGCTTGCTGTTCCTCACT | |
| GTTCCCCTCCTGCTGATCGTCTTCTCGTATGTCCGCATTTTCTGGGCTGTGTTTGTCATCTC | |
| ATCTCCTGGAGGGAGATGGAAGGCCTTCTCTACCTGTGGTTCTCATCTCACGGTGGTTCTG | |
| CTCTTCTATGGGTCTCTTATGGGTGTGTATTTACTTCCTCCATCAAGTTACTCTACAGAGAG | |
| GGAAAGTAGGGCTGCTGTTCTCTATATGGTGATTATTCCCACGCTAAACCCATTCATTTAT | |
| AGCTTGAGGAACAGAGACATGAAGGAGGCTTTGGGTAAACTTTTTGTCAGTGGAAAAACA | |
| TTCTTTTTATGA | |
| AOLFR116 sequences: | |
| MDEANHSVVSEFVFLGLSDSRKIQLLLFLFFSVFYVSSLMGNLLIVLTVTSDPRLQSPMYFLLAN | (SEQ ID NO: 213) |
| LSIINLVFCSSTAPKMIYDLFRKHKTISFGGCVVQIFFIHAVGGTEMVLLIAMAFDRYVAICKPLH | |
| YLTIMNPQRCILFLVISWIIGIIHSVIQLAFVVDLLFCGPNELDSFFCDLPRFIKLACIETYTLGFMV | |
| TANSGFISLASFLILIISYIFILVTVQKKSSGGIFKAFSMLSAHVIVVVLVFGPLIFFYIFPFPTSHLD | |
| KFLAIFDAVITPVLNPVIYTFRNKEMMVAMRRRCSQFVNYSKIF | |
| ATGGATGAAGCCAATCACTCTGTGGTCTCTGAGTTTGTGTTCCTGGGACTCTCTGACTCGC | (SEQ ID NO: 214) |
| GGAAGATCCAGCTCCTCCTCTTCCTCTTTTTCTCAGTGTTCTATGTATCAAGCCTGATGGGA | |
| AATCTCCTCATTGTGCTAACTGTGACCTCTGACCCTCGTTTACAGTCCCCCATGTACTTCCT | |
| GCTGGCCAACCTTTCCATCATCAATTTGGTATTTTGTTCCTCCACAGCTCCCAAGATGATTT | |
| ATGACCTTTTCAGGAAGCACAAGACCATCTCTTTTGGGGGCTGTGTAGTTCAGATCTTCTT | |
| TATCCATGCAGTTGGGGGAACTGAGATGGTGCTGCTCATAGCCATGGCTTTTGACGGATAT | |
| GTGGCCATATGTAAGCCTCTCCACTACCTGACGATCATGAACCCACAAAGGTGCATTTTGT | |
| TTTTAGTCATTTCCTGGATTATAGGTATTATTCACTCAGTGATTCAGTTGGCTTTTGTTGTA | |
| GACCTGCTGTTCTGTGGCCCTAATGAATTAGATAGTTTCTTTTGTGATCTTCCTCGATTTAT | |
| CAAACTGGCTTGCATAGAGACCTACACATTGGGATTCATGGTTACTGCCAATAGTGGATTT | |
| ATTTCTCTGGCTTCTTTTTTAATTCTCATAATCTCTTACATCTTTATTTTGGTGACTGTTCAG | |
| AAAAAATCTTCAGGTGGTATATTCAAGGCTTTGTCTATGCTGTCAGCTCATGTCATTGTGG | |
| TGGTTTTGGTCTTTGGGCCATTAATCTTTTTCTATATTTTTCCATTTCCCACATCACATCTTG | |
| ATAAATTCCTTGCCATCTTTGATGCAGTTATCACTCCCGTTTTGAATCCAGTCATCTATACT | |
| TTTAGAAATAAAGAGATGATGGTGGCAATGAGAAGACGATGCTCTCAGTTTGTGAATTAC | |
| AGTAAAATCTTTTAA | |
| AOLFR117 sequences: | |
| MNNTIVFVIKIQIEKSDLKYRAISLQEISKISLLFWVLLLVISRLLLAMTLGNSTEVTEFYLLGFGA | (SEQ ID NO: 215) |
| QHEFWCILFIVFLLIYVTSIMGNSGIILLINTDSRFQTLTYFFLQHLAFVDICYTSAITPKMLQSFT | |
| EEKNLILFQGCVIQFLVYATFATSDCYLLAMMAVDPYVAICKPLHYTVIMSRTVCIRLVAGSYI | |
| MGSINASVQTGFTCSLSFCKSNSINHFFCDVPPILALSCSNVDINIMLLVVFVGSNLIFTGLVVIFS | |
| YIYIMATILKMSSSAGRKKSFSTCASHLTAVTIFYGTLSYMYLQSHSNNSQENMKVAFIFYGTVI | |
| PMLNPLIYSLRNKEVKEALKVIGKKLF | |
| ATGAATAACACTATTGTATTTGTCATAAAAATACAAATAGAAAAAAGTGACTTGAAATATA | (SEQ ID NO: 216) |
| GAGCCATTTCATTGCAAGAAATCTCAAAGATTTCCCTTCTTTTCTGGGTCCTTCTCTTGGTC | |
| ATTTCTAGACTTTTACTAGCCATGACACTAGGAAACAGCACTGAAGTCACTGAATTCTATC | |
| TTCTGGGATTTGGTGCCGAGCATGAGTTTTGGTGTATCCTCTTCATTGTATTCCTTCTCATC | |
| TATGTGACCTCCATAATGGGTAATAGTGGAATAATCTTACTCATCAACACAGATTCCAGAT | |
| TTCAAACACTCACGTACTTTTTTCTACAACATTTGGCTTTTGTTGATATCTGTTACACTTCT | |
| GCTATCACTCCCAAGATGCTCCAAAGCTTCACAGAAGAAAAGAATTTGATATTATTTCAGG | |
| GCTGTGTGATACAATTCTTAGTTTATGCAACATTTGCAACCAGTGACTGTTATCTCCTGGCT | |
| ATGATGGCAGTGGATCCTTATGTTGCCATCTGTAAGCCCCTTCACTATACTGTAATCATGT | |
| CCCGAACAGTCTGCATCCGTFfTGGTAGCTGGTTCATACATCATGGGCTCAATAAATGCCTC | |
| TGTACAAACAGGTTTTACATGTTCACTGTCCTTCTGCAAGTCCAATAGCATCAATCACTTTT | |
| TCTGTGATGTTCCCCCTATTCTTGCTCTTTCATGCTCCAATGTTGACATCAACATCATGCTA | |
| CTTGTTGTCTTTGTGGGATCTAACTTGATATTCACTGGGTTGGTCGTCATCTTTTCCTACAT | |
| CTACATCATGGCCACCATCCTGAAAATGTCTTCTAGTGCAGGAAGGAAAAAATCCTTCTCA | |
| ACATGTGCTTCCCACCTGACCGCAGTGACCATTTTCTATGGGACACTCTCTTACATGTATTT | |
| GCAGTCTCATTCTAATAATTCCCAGGAAAATATGAAAGTGGCCTTTATATTTTATGGCACA | |
| GTTATTCCCATGTTAAATCCTTTAATCTATAGCTTGAGAAATAAGGAAGTAAAAGAAGCTT | |
| TAAAAGTGATAGGGAAAAAGTTATTTTAA | |
| AOLFR118 sequences: | |
| MNHMSASLKISNSSKFQVSEFILLGFPGIHSWQHWLSLPLALLYLSALAANTLILIIIWQNPSLQQ | (SEQ ID NO: 217) |
| PMYIFLGILCMVDMGLATTIIPKILAIFWFDAKVISLPECFAQIYAIHFFVGMESGILLCMAFDRY | |
| VAICHPLRYPSIVTSSLILKATLFMVLRNGLFVTPVPVLAAQRDYCSKNEIEHCLCSNLGVTSLA | |
| CDDRRPNSICQLVLAWLGMGSDLSLIILSYILILYSVLRINSAEAAAKALSTCSSHLTLILFFYTIV | |
| VVISVTHLTEMKATLIPVLLNVLHIIPPSLNPTVYALQTKELRAAFQKVLFALTKEIRS | |
| ATGAATCATATGTCTGCATCTCTCAAAATCTCCAATAGCTCCAAATTCCAGGTCTCTGAGTT | (SEQ ID NO: 218) |
| CATCCTGCTGGGATTCCCGGGCATTCACAGCTGGCAACACTGGCTATCTCTGCCCCTGGCA | |
| CTACTGTATCTCTCAGCACTTGCTGCAAACACCCTCATCCTCATCATCATCTGGCAGAACCC | |
| TTCTTTACAGCAGCCCATGTATATTTTCCTTGGCATCCTCTGTATGGTAGACATGGGTCTGG | |
| CCACTACTATCATCCCTAAGATCCTGGCCATCTTCTGGTTTGATGCCAAGGTTATTAGCCTC | |
| CCTGAGTGCTTTGCTCAGATTTATGCCATTCACTTCTTTGTGGGGATGGAGTCTGGTATCCT | |
| ACTCTGCATGGCTTTTGATAGATATGTGGCTATTTGTCACCCTCTTCGCTATCCATCAATTG | |
| TCACCAGTTCCTTAATCTTAAAAGCTACCCTGTTCATGGTGCTGAGAAATGGCTTATTTGTC | |
| ACTCCAGTGCCTGTGCTTGCAGCACAGCGTGATTATTGCTCCAAGAATGAAATTGAACACT | |
| GCCTGTGCTCTAACCTTGGGGTCACAAGCCTGGCTTGTGATGACAGGAGGCCAAACAGCAT | |
| TTGCCAGTTGGTTCTGGCATGGCTTGGAATGGGGAGTGATCTAAGTCTTATTATACTGTCA | |
| TATATTTTGATTCTGTACTCTGTACTTAGACTGAACTCAGCTGAAGCTGCAGCCAAGGCCC | |
| TGAGCACTTGTAGTTCACATCTCACCCTCATCCTTTTCTTTTAGACTATTGTTGTAGTGATT | |
| TCAGTGACTCATCTGACAGAGATGAAGGCTACTTTGATTCCAGTTCTACTTAATGTGTTGC | |
| ACAACATCATCCGCCCTTCCCTCAACCCTACAGTTTATGCACTTCAGACCAAAGAACTTAG | |
| GGCAGCCTTCCAAAAGGTGCTGTTTGCCCTTACAAAAGAAATAAGATCTTAG | |
| AOLFR119 sequences: | |
| MPLFNSLCWFPTIHVTPPSFILNGIPGLERVHVWISLPLCTMYIIFLVGNLGLVYLIYYEESLHHP | (SEQ ID NO: 219) |
| MYFFFGHALSLIDLLTCTTTLPNALCIFWFSLKEINFNACLAQMFFVHGFTGVESGVLMLMALD | |
| RYIAICYPLRYATTLTNPIIAKAELATFLRGVLLMIPFPFLVKRLPFCQSNIISHTYCDHMSVVKL | |
| SCASIKVNVIYGLMVALLIGVFDICCISLSYTLILKAAISLSSSDARQKAFSTCTAHISAIIITYVPA | |
| FFTFFAHRFGGHTIPPSLHIIVANLYLLLPPTLNPIVYGVKTKQIRKSVIKFFQGDKGAG | |
| ATGCCTCTATTTAATTCATTATGCTGGTTTCCAACAATTCATGTGACTCCTCCATCTTTTAT | (SEQ ID NO: 220) |
| TCTTAATGGAATACCTGGTCTGGAAAGAGTACATGTATGGATCTCCCTCCCACTCTGCACA | |
| ATGTACATCATCTTCCTTGTGGGGAATCTTGGTCTTGTGTACCTCATTTATTATGAGGAGTC | |
| CTTACATCATCCGATGTATTTTTTTTTTGGCCATGCTCTCTCCCTCATTGACCTCCTTACCTG | |
| CACCACCACTCTACCCAATGCACTCTGCATCTTCTGGTTCAGTCTCAAAGAAATTAACTTCA | |
| ATGCTTGGTTGGCCCAGATGTTCTTTGTTCATGGGTTGACAGGTGTGGAGTCTGGGGTGCT | |
| CATGCTCATGGCTCTAGACCGCTATATAGCCATTTGCTACCCTTTGCGTTATGCTACCACAC | |
| TCACCAACCCTATCATTGCCAAGGCTGAGCTTGCCACCTTCCTGAGGGGTGTATTGCTGAT | |
| GATTCCTTTCCCATFCTTGGTTAAGCGTTTGCCTTTCTGCCAAAGCAATATTATCTCCCATA | |
| CGTACTGCGACCACATGTCTGTAGTAAAGCTATCTTGTGCCAGCATCAAGGTCAATGTAAT | |
| CTATGGTCTAATGGTTGCTCTCCTGATTGGAGTGTTTGACATTTGTTGTATATCTTTGTCTT | |
| ACACTTTGATCCTCAAGGCAGCGATCAGCGTCTCTTCATCAGATGCTCGGCAGAAGGCTTT | |
| CAGCACCTGCACTGCCCATATATCTGCCATCATCATCACCTATGTTCCAGCATTCTTCACTT | |
| TCTTTGCCCACCGTTTTGGGGGACACACAATTCCCCCTTCTCTTCACATCATTGTGGCTAAT | |
| CTTTATCTTCTTCTTCCCCCAACTCTAAACCCTATTGTTTATGGAGTAAAGACAAAACAGAT | |
| ACGGAAGAGTGTCATAAAGTTCTTCCAGGGTGATAAGGGTGCAGGTTGA | |
| AOLFR120 sequences: | |
| MQPYTKNWTQVTEFVMMGFAGIHEAHLLFFILFLTMYLFTLVENLAIILVVGLDHRLRRPMYF | (SEQ ID NO: 221) |
| FLTHLSCLEIWYTSVTVPKMLAGFIGVDGGKNISYAGCLSQLFIFTFLGATECFLLAAMAYDRY | |
| VAICMPLHYGAFVSWGTCIRLAAACWLVGFLTPILPIYLLSQLTFCGPNVIDHFSCDASPLLALS | |
| CSDVTWKETVDFLVSLAVLLASSMVIAVSYGNIVWTLLHIRSAAERWKAFSTCAAHLTVVSLF | |
| YGTLFFMYVQTKVTSSINFNKVVSVFYSVVTPMLNPLIYSLRNKEVKGALGRVFSLNFWKGQ | |
| ATGCAACCATATACCAAAAACTGGACCCAGGTAACTGAATTTGTCATGATGGGCTTTGCTG | (SEQ ID NO: 222) |
| GCATCCATGAAGCACACCTCCTCTTCTTCATACTCTTCCTCACCATGTACCTGTTCACCTTG | |
| GTGGAGAATTTGGCCATCATTTTAGTGGTGGGTTTGGACCACCGACTACGGAGACCCATGT | |
| ATTTCTTCCTGACACACTTGTCCTGCCTTGAAATCTGGTACACTTCTGTTACAGTGCCCAAG | |
| ATGCTGGCTGGTTTTATTGGGGTGGATGGTGGCAAGAATATCTCTTATGCTGGTTGCCTAT | |
| CCCAGCTCTTCATCTTCACCTTTCTTGGGGCAACTGAGTGTTTCCTACTGGCTGCCATGGCC | |
| TATGATCGTTATGTGGCCATTTGTATGCCTCTCCACTATGGGGCTTTTGTGTCCTGGGGCAC | |
| CTGCATCCGTCTGGCAGCTGCCTGTTGGCTGGTAGGTTTCCTCACACCCATCTTGCCAATCT | |
| ACCTCTTGTCTCAGCTAACATTTTGTGGCCCAAATGTCATTGACCATTTCTCGTGTGATGCC | |
| TCACCCTTGCTAGCCTTGTCGTGCTCAGATGTCACTTGGAAGGAGACTGTGGATTTCCTGG | |
| TGTCTCTGGCTGTGCTACTGGCCTCCTCTATGGTCATTGCTGTGTCCTATGGCAACATCGTC | |
| TGGACACTGCTGCACATCCGGTGAGCTGCTGAGCGCTGGAAGGCCTTCTCTACCTGTGCAG | |
| GTCACCTGACTGTGGTGAGCCTCTTCTATGGCACTCTTTTCTTTATGTATGTCCAGACCAAG | |
| GTGACCTCCTCCATCAACTTCAACAAGGTGGTATCTGTCTTCTACTCTGTTGTCACGCCCAT | |
| GCTCAATCCTCTCATCTACAGTCTTAGGAACAAGGAAGTGAAGGGAGCTCTGGGTCGAGTC | |
| TTTTCTCTCAACTTTTGGAAGGGACAGTGA | |
| AOLFR121 sequences: | |
| MKRKNFTEVSEFIFLGFSSFGKHQITLFVVFLTVYILTLVANIIIVTIICIDHHLHTPMYFFLSMLA | (SEQ ID NO: 223) |
| SSETVYTLVIVPRMLLSLIFHNQPISLAGCATQMFFFVILATNNCFLLTAMGYDRYVAICRPLRY | |
| TVIMSKGLCAQLVCGSFGIGLTMAVLHVTAMFNLPFCGTVVDHFFCDIYPVMKLSCIDTTINEII | |
| NYGVSSFVIFVPIGLIFISYVLVISSILQIASAEGRKKTFATCVSHLTVVIVHCGCASIAYLKPKSES | |
| SIEKDLVLSVTYTIITPLLNPVVYSLRNKEVKDALCRVVGRNIS | |
| ATGAAGAGAAAGAACTTCACAGAAGTGTCAGAATTCATTTTCTTGGGATTTTCTAGCTTTG | |
| GAAAGCATCAGATAACCCTCTTTGTGGTTTTCCTAACTGTCTACATTTTAACTCTGGTTGCT | |
| AACATCATCATTGTGACTATCATCTGCATTGACCATCATCTCCACACTCCCATGTATTTCTT | |
| CCTAAGCATGCTGGCTAGTTCAGAGACGGTGTACACACTGGTCATTGTGCCACGAATGCTT | |
| TTGAGCCTCATTTTTCATAACCAACCTATCTCCTTGGCAGGCTGTGCTACACAAATGTTCTT | (SEQ ID NO: 224) |
| TTTTGTTATCTTGGCCACTAATAATTGCTTCCTGCTTACTGCAATGGGGTATGACCGCTATG | |
| TGGCCATCTGCAGACCCCTGAGATACACTGTCATCATGAGCAAGGGACTATGTGCCCAGCT | |
| GGTGTGTGGGTCCTTTGGCATTGGTCTGACTATGGCAGTTCTCCATGTGACAGCCATGTTC | |
| AATTTGCCGTTCTGTGGCACAGTGGTAGACCACTTCTTTTGTGACATTTACCCAGTCATGA | |
| AACTTTCTTGCATTGATACCACTATCAATGAGATAATAAATTATGGTGTAAGTTCATTTGT | |
| GATTTTTGTGCCCATAGGCCTGATATTTATCTCCTATGTCCTTGTCATCTCTTCCATCCTTC | |
| AAATTGCCTCAGCTGAGGGCCGGAAGAAGACCTTTGCCACCTGTGTCTCCCACCTCACTGT | |
| GGTTATTGTCCACTGTGGCTGTGCCTCCATTGCCTACCTCAAGCCGAAGTCAGAAAGTTCA | |
| ATAGAAAAAGACCTTGTTCTCTCAGTGACGTACACCATCATCACTCCCTTGCTGAACCCTG | |
| TTGTTTACAGTCTGAGAAACAAGGAGGTAAAGGATGCCCTATGCAGAGTTGTGGGCAGAA | |
| ATATTTCTTAA | |
| AOLFR122 sequences: | |
| MEWENQTILVEFFLKGHSVHPRLELLFFVLIFIMYVVILLGNGTLILISILDPHLHTPMYFFLGNL | (SEQ ID NO: 225) |
| SFLDICYTTTSIPSTLVSFLSERKTISFSGCAVQMFLGLAMGTTECVLLGMMAFDRYVAICNPLR | |
| YPIIMSKNAYVPMAVGSWFAGIVNSAVQTTFVVQLPFCRKNVINHFSCEILAVMKLACADISGN | |
| EFLMLVATILFTLMPLLLIVISYSLIISSILKIHSSEGRSKAFSTCSAHLTVVIIFYGTILFMYMKPKS | |
| KETLNSDDLDATDKIISMFYGVMTPMMNPLIYSLRNKDVKEAVKHLPNRRFFSK | |
| ATGGAATGGGAAAACCAAACCATTCTGGTGGAATTTTTTCTGAAGGGAGATTCTGTTCAGC | (SEQ ID NO: 226) |
| CAAGGCTTGAGTTACTCTTTTTTGTGCTAATCTTCATAATGTATGTGGTCATCCTTCTGGGG | |
| AATGGTACTCTCATTTTAATCAGCATCTTGGACCCTCACCTTCACACCCCTATGTACTTCTT | |
| TCTGGGGAACCTCTCCTTCTTGGACATCTGCTACACCACCACCTCTATTCCCTCCACACTAG | |
| TGAGCTTCCTTTCAGAAAGAAAGACCATTTCCTTTTCTGGCTGTGCAGTGCAGATGTTCCTT | |
| GGCTTGGCCATGGGGACAACAGAGTGTGTGCTTCTGGGCATGATGGCCTTTGACCGCTATG | |
| TGGCTATCTGCAACCCTCTGAGATATCCCATCATCATGAGCAAGAATGCCTATGTACCCAT | |
| GGCTGTTGGGTCCTGGTTTGCAGGGATTGTCAACTCTGCAGTACAAACTACATTTGTAGTA | |
| CAATTGCCTTTCTGCAGGAAGAATGTCATCAATCATTTCTCATGTGAAATTCTAGCTGTCAT | |
| GAAGTTGGCCTGTGCTGACATGTCAGGCAATGAGTTCCTCATGCTTGTGGCCACAATATTG | |
| TTCACATTGATGCCACTGCTCTTGATAGTTATCTCTTACTCATTAATCATTTCCAGCATCCT | |
| CAAGATTCACTCCTCTGAGGGGAGAAGCAAAGCTTTCTCTACGTGCTCAGCCCATCTGACT | |
| GTGGTCATAATATTCTATGGGACCATCCTCTTCATGTATATGAAGCCCAAGTCTAAAGAGA | |
| CACTTAATTCAGATGACTTGGATGCTACCGACAAAATTATATCCATGTTCTATGGGGTGAT | |
| GACTCCCATGATGAATCCTTTAATCTACAGTCTTAGAAACAAGGATGTGAAAGAGGCAGT | |
| AAAACACCTACCGAACAGAAGGTTCTTTAGCAAGTGA | |
| AOLFR123 sequences: | |
| MYRFTDFDVSNISIYLNHVLFYTTQQAGDLEHMETRNYSMATEFFLVGLSQYPELQLFLFLLCL | (SEQ ID NO: 227) |
| IMYMIILLGNSLLIIITILDSRIHTPMYFFLGNLSFLDICYTSSSIPPMLIIFMSERKSISFIGCALQM | |
| VVSLGLGSTECVLLAVMAYDHYVAICNPLRYSIIMNGVLYVQMAAWSWIIGCLTSLLQTVLT | |
| MMLPFCGNNVIDHITCEILALLKLVCSDITINVLIMTVTNIVSLVILLLLIFISYVFILSSILRINCAE | |
| GRKKAFSTCSAHSIVVILFYGSALFMYMKPKSKNTNTSDEIIGLSYGVVSPMLNPIIYSLRNKEV | |
| KEAVKKVLSRHLHLLKM | |
| ATGTACAGATTTACAGATTTTGATGTATCAAACATTTCAATTTACCTGAATCATGTGCTTTT | (SEQ ID NO: 228) |
| CTATACTACCCAGCAGGCAGGTGACCTAGAACACATGGAGACAAGAAATTACTCTGCCAT | |
| GACTGAATTCTTTCTGGTGGGGCTTTCCCAATATCCAGAGCTCCAGCTTTTTCTGTTCCTGC | |
| TCTGCCTCATCATGTACATGATAATCCTCCTGGGAAATAGCCTCCTCATTATCATCACCATC | |
| TTGGATTCTCGCCTCCATACTCCCATGTATTTCTTTCTTGGAAACCTCTCATTCTTGGACAT | |
| CTGTTACACATCCTCATCCATTCCTCCAATGCTTATTATATTTATGTCTGAGAGAAAATCCA | |
| TCTCCTTCATTGGCTGTGCTCTGCAGATGGTTGTGTCCCTTGGCTTGGGCTCCACTGAGTGT | |
| GTCCTCCTGGCTGTGATGGCCTATGACCACTATGTGGCCATCTGCAACCCACTGAGGTACT | |
| CCATCATCATGAACGGAGTGCTGTATGTGCAAATGGCTGCATGGTCCTGGATCATAGGCTG | |
| TCTGACCTCCCTATTGCAAACAGTTCTGACAATGATGTTGCCTTTCTGTGGGAATAATGTC | |
| ATTGATCATATTACCTGTGAAATTTTGGCCCTTCTAAAACTTGTTTGTTCAGATATCACCAT | |
| CAATGTGCTTATCATGACAGTGACAAATATTGTTTCACTGGTGATTCTTCTACTGTTAATTT | |
| TCATCTCCTATGTGTTTATTCTCTCTTCCATCCTGAGAATTAATTGTGCTGAGGGAAGAAAG | |
| AAAGCCTTCTCTACCTGTTCAGCGCACTCGATTGTGGTCATCTTATTCTACGGTTCAGCCCT | |
| TTTTATGTACATGAAACCCAAGTCAAAGAACACTAATACATCTGATGAGATTATTGGGCTG | |
| TCTTATGGAGTGGTAAGCCCAATGTTAAATCCCATCATCTATAGCCTCAGGAATAAAGAGG | |
| TCAAAGAGGCTGTAAAGAAAGTCCTGAGCAGACATCTGCATTTATTGAAAATGTGA | |
| AOLFR124 sequences: | |
| MNHSVVTEFIILGLTKKPELQGIIFLFFLIVYLVAFLGNMLIIIAKIYNNTLHTPMYVFLLTLAVV | (SEQ ID NO: 229) |
| DIICTTSIIPKMLGTMLTSENTISYAGCMSQLFLFTWSLGAEMVLFTTMAYDRYVAICFPLHYST | |
| VMNHHMCVALLSMVMAIAVTNSWVHTALIMRLTFCGPNTIDHFFCEIPPLLALSCSPVRINEV | |
| MVYVADITLAIGDFILTCISYGFIIVAILRIRTVEGKRKAFSTCSSHLTVVTLYYSPVIYTYIRPASS | |
| YTFERDKVVAALYTLVTPTLNPMVYSFQNREMQAGIRKVFAFLKH | |
| ATGAATCACAGCGTTGTAACTGAGTTCATTATTCTGGGCCTCACCAAAAAGCCTGAACTCC | (SEQ ID NO: 230) |
| AGGGAATTATCTTCCTCTTTTTTCTCATTGTCTATCTTGTGGCTTTTCTCGGCAACATGCTC | |
| ATCATGATTGCCAAAATCTATAAGAACACCTTGCATACGCCCATGTATGTTTTCCTTCTGAC | |
| ACTGGCTGTTGTGGACATCATCTGCACAACAAGCATCATACCGAAGATGCTGGGGACCAT | |
| GCTAACATCAGAAAATACCATTTCATATGCAGGCTGCATGTCCCAGCTCTTCTTGTTCACA | |
| TGGTCTCTGGGAGCTGAGATGGTTCTCTTCACCACCATGGCCTATGACCGCTATGTGGCCA | |
| TTTGTTTCCCTCTTCATTACAGTACTGTTATGAACCACCATATGTGTGTAGCCTTGCTCAGC | |
| ATGGTCATGGCTATTGCAGTCACCAATTCCTGGGTGCACACAGCTCTTATCATGAGGTTGA | |
| CTTTCTGTGGGCCAAACACCATTGACCACTTCTTCTGTGAGATACCCCCATTGCTGGCTTTG | |
| TCCTGTAGCCCTGTAAGAATCAATGAGGTGATGGTGTATGTTGCTGATATTACCCTGGCCA | |
| TAGGGGACTTTATTCTTACCTGCATGTCCTATGGTTTTATGATTGTTGCTATTCTCCGTATC | |
| CGCACAGTAGAAGGCAAGAGGAAGGCCTTCTCAACATGCTCATCTCATCTCACAGTGGTG | |
| ACCCTTTACTATTCTCCTGTAATCTACACCTATATCCGCCCTGCTTCCAGCTATACATTTGA | |
| AAGAGACAAGGTGGTAGCTGCACTCTATACTCTTGTGACTCCCACATTAAACCCGATGGTG | |
| TACAGCTTCCAGAATAGGGAGATGCAGGCAGGAATTAGGAAGGTGTTTGCATTTCTGAAA | |
| CACTAG | |
| AOLFR125 sequences: | |
| MTNQTQMMEFLLVRFTENWVLLRIHALLFSLIYLTAVLMNLVIILLMILDHRLHMAMYFFLRH | (SEQ ID NO: 231) |
| LSFLDLCLISATVPKSILNSVASTDSISFLGCVLQLFLVVLLAGSEIGILTAMSYDRYAAICCPLHC | |
| EAVMSRGLCVQLMALSWLNRGALGLLYTAGTFSLNFYGSDELHQFFCDVPALLKLTCSKEHAI | |
| ISVSVAIGVCYAFSCLVCIVVSYVYIFSAVLRISQRQRQSKAFSNCVPHLIVVTVFLVTGAVAYL | |
| KPGSDAPSILDLLVSVFYSVAPPTLNPVIYCLKNKDIKSALSKVLWNVRSSGVMKDD | |
| ATGACCAATCAGACACAGATGATGGAATTCTTGCTTGTGAGATTTACTGAGAATTGGGTGC | (SEQ ID NO: 232) |
| TCCTGAGGCTGCATGCTTTGCTCTTCTCACTGATCTACCTCACGGCTGTGCTGATGAATTTA | |
| GTCATCATTCTCCTCATGATTCTGGACCATCGTCTCCACATGGCAATGTACTTTTTCCTCCG | |
| ACATTTGTCCTTCTTAGACCTGTGTCTCATTTCTGCCACAGTCCCCAAATCCATCCTCAACT | |
| CTGTCGCCTCCACTGACTCCATCTCCTTCCTGGGGTGTGTGTTGCAGCTCTTCTTGGTGGTA | |
| CTGCTGGCTGGATCAGAGATTGGCATCCTTACTGCCATGTCCTATGACCGCTATGCTGCCA | |
| TCTGCTGCCCCCTACACTGTGAGGCTGTCATGAGCAGAGGGCTCTGTGTCCAGTTGATGGC | |
| TCTGTCCTGGCTCAACAGAGGGGCCTTGGGACTCTTGTACACAGCTGGAACATTCTCTCTG | |
| AATTTTTATGGCTCTGATGAGCTACATCAGTTCTTCTGCGATGTCCCTGCCCTACTAAAGCT | |
| CACTTGTTCTAAAGAACATGCCATCATTAGTGTCAGTGTGGCCATTGGGGTCTGTTATGCA | |
| TTTTCATGTTTAGTTTGCATTGTAGTTCCTATGTGTACATTTTCTCTGCTGTGTTAAGGAT | |
| ATCACAGAGACAGAGACAATCCAAAGCCTTTTCCAACTGTGTGCCTCACCTCATTGTTGTC | |
| ACTGTGTTTCTTGTAACAGGTGCTGTTGCTTATTTAAAGCCAGGGTCTGATGCACCTTCTAT | |
| TCTAGACTTGCTGGTGTCTGTGTTCTATTCTGTCGCACCTCCAACCTTGAACCCTGTTATCT | |
| ACTGTCTGAAGAACAAGGACATTAAATCCGCTCTGAGTAAAGTCCTGTGGAATGTTAGAA | |
| GCAGTGGGGTAATGAAAGATGACTAA | |
| AOLFR126 sequences: | |
| MFLYLCFIFQRTCSEEMEEENATLLTEFVLTGFLHQPDCKIPLFLAFLVIYLITIMGNLGLIVLIW | (SEQ ID NO: 233) |
| KDPHLHIPMYLFLGSLAFVDASLSSTVTPKMLINFLAKSKMISLSECMVQFFSLVTTVTTECFLL | |
| ATMAYDRYVAICKALLYPVIMTNELCIQLLVLSFIGGLLHALIHEAFSFRITFCNSNIIQHFYCDII | |
| PLLKISCTDSSINFLMVFIFAGSVQVFTIGTILISYTIILFTILEKKSIKGIRKAVSTCGAHLLSVSLY | |
| YGPLTFKYLGSASPQADDQDMMESLFYTVIVPLLNPMIYSLRNKQVIASFTKIVIFKSNV | |
| ATGTTCCTTTACCTTTGCTTCATTTTTCAGAGGACATGCAGTGAGGAGATGGAAGAGGAAA | (SEQ ID NO: 234) |
| ATGCAACATTGCTGACAGAGTTTGTTCTCACAGGATTTTTACATCAACCTGACTGTAAAAT | |
| ACCGCTCTTCCTGGCATTCTTGGTAATATATCTCATCACCATCATGGGGAATCTTGGTCTAA | |
| TTGTTCTCATCTGGAAAGACCCTCACCTTCATATCCCAATGTACTTATTCCTTGGGAGTTTA | |
| GCCTTTGTGGATGCTTCGTTATCATCCACAGTGACTCCGAAGATGCTGATGAACTTCTTAG | |
| CTAAGAGTAAGATGATATCTCTCTGTGAATGCATGGTACAATTTTTTTCCCTTGTAACCACT | |
| GTAACCACAGAATGTTTTCTCTTGGCAACAATGGCATATGATCGCTATGTAGCCATTTGCA | |
| AAGCTTTACTITTATCCAGTGATTATGACCAATGAACTATGCATTCAGCTATTAGTCTTGTCA | |
| TTTATAGGTGGCCTTCTTCATGCTTTAATCCATGAAGCTTTTTCATTCAGATTAACCTTCTG | |
| TAATTCCAACATAATACAACACTTTTACTGTGACATTATCCCATTGTTAAAGATTTCCTGTA | |
| CTGATTCCTCTATTAACTTTCTAATGGTTTTTATTTTCGCAGGTTCTGTTCAAGTTTTTACCA | |
| TTGGAACTATTCTTATATCTTATACAATTATCCTCTTTACAATCTTAGAAAAGAAGTCTATC | |
| AAAGGGATACGAAAAGCTGTCTCCACCTGTGGGGCTCATCTCTTATCTGTATCTTTATACT | |
| ATGGCCCCCTCACCTTCAAATATGTGGGCTCTGCATCTCCGCAAGCAGATGACCAAGATAT | |
| GATGGAGTCTCTATTTTACACTGTCATAGTTCCTTTATTAAATCCCATGATCTACAGCCTGA | |
| GAAACAAGCAAGTAATAGCTTCATTCACAAAAATGTTCAAAAGCAATGTTTAG | |
| AOLFR127 sequences: | |
| MSNEDMEQDNTTLLTEFVLTGLTYQPEWKMPLFLVFLVIYLITIVWNLGLIALIWNDPQLHIPM | (SEQ ID NO: 235) |
| YFFLGSLAFVDAWISSTVTPKMLVNFLAKNRMISLSECMIQFFSFAFGGTTECFLLATMAYDRY | |
| VAICKPLLYPVIMNNSLCIRLLAFSFLGGFLHALIHEVLIFRLTFCNSNIIHHFYCDIIPLFMISCTD | |
| PSINFLMVFILSGSIQVFTIVTVLNSYTFALFTILKKKSVRGVRKAYSTCGAHLLSVSLYYGPLIF | |
| MYLRPASPQADDQDMIDSVFYTIIIPLLNPIIYSLRNKQVIDSFTKMVKRNV | |
| ATGTCGAATGAGGACATGGAACAGGATAATACAACATTGCTGACAGAGTTTTGTTCTCACA | (SEQ ID NO: 236) |
| GGACTTACATATCAGCCAGAGTGGAAAATGCCCCTGTTCTTGGTGTTCTTGGTGATCTATC | |
| TCATCACTATTGTGTGGAACCTTGGTCTGATTGCTCTTATCTGGAATGACCCACAACTTCAC | |
| ATCCCCATGTACTTTTTTCTTGGGAGTTTAGCCTTTGTTGATGCTTGGATATCTTCCACAGT | |
| AACTCCCAAAATGTTGGTTAATTTCTTGGCCAAAAACAGGATGATATCTCTGTCTGAATTGC | |
| ATGATTCAATTTTTTTCCTTTGCATTTGGTGGAACTACAGAATGTTTTCTCTTGGCAACAAT | |
| GGCATATGATCGCTATGTAGCCATATGCAAACCTTTACTATATCCAGTGATTATGAACAAT | |
| TCACTATGCATACGGCTGTTAGCCTTCTCATTTTTAGGTGGCTTCCTCCATGCGTTAATTCA | |
| TGAAGTCCTTATATTCAGATTAACCTTCTGCAATTCTAACATAATACATGATTTTTACTGTG | |
| ATATTATACCACTGTTTATGATTTCCTGTACTGACCCTTCTATTAATTTTCTAATGGTTTTTA | |
| TTTTGTCTGGCTCAATTCAGGTATTCACCATTGTGACAGTTCTTAATTCTTACACATTTGCT | |
| CTTTTCACAATCCTAAAAAAGAAGTCTGTTAGAGGCGTAAGGAAAGGGTTTTCCACCTGTG | |
| GAGCCCATCTCTTATCTGTCTCTTTATATTATGGCCCACTTATCTTCATGTATTTCGCCCT | |
| GCATCTCCAGAAGCAGATGACCAAGATATGATAGACTCTGTCTTTTATACAATCATAATTC | |
| CTTTGCTAAATCCCATTATCTACAGTCTGAGAAATAAACAAGTAATAGATTCATTCACAAA | |
| AATGGTAAAAAGAAATGTTTAG | |
| AOLFR128 sequences: | |
| METQNLTVVTEFILLGLTQSQDAQLLVFVLVLIFYLIILPGNFLIIFTIKSDPGLTAPLYFFLGNLA | (SEQ ID NO: 237) |
| LLDASYSFIVVPRMLVDFLSEKKVISYRSCITQLFFLHFLGAGEMFLLVVMAFDRYIAICRPLHY | |
| STIMNPRACYALSLVLWLGGFIHSIVQVALILHLPFCGPNQLDNFFCDVPQVIKLACTNTFVVEL | |
| LMVSNSGLLSLLCFLGLLASYAVILCPIREHSSEGKSKAISTCTTHIIIIFLMFGPAIFIYTCPFQAFP | |
| ADKVVSLFHTVIFPLMNPVIYTLRNQEVKASMRKLLSQHMFC | |
| ATGGAAACACAGAACCTGACAGTGGTGACAGAATTCATTCTTCTTGGTCTGACCCAGTCTC | (SEQ ID NO: 238) |
| AAGATGCTCAACTTCTGGTCTTTGTGCTAGTCTTAATTTTCTACCTTATCATCCTCCCTGGA | |
| ATTTCCTCATCATTTTCACCATAAAGTCAGACCCTGGGCTCACAGCCCCCCTCTATTTCTT | |
| TCTGGGCAACTTGGCCTTACTGGATGCATCCTACTCCTTCATTGTGGTTCCCAGGATGTTG | |
| GTGGACTTCCTCTCTGAGAAGAAGGTAATCTCCTATAGAAGCTGCATCACTGAGCTCTTTT | |
| TCTTGCATTTTCTTGGAGCGGGAGAGATGTTCCTCCTCGTTGTGATGGCCTTTGACCGCTAC | |
| ATCGCCATCTGCCGGCCTTTACACTATTCAACCATCATGAAGCCTAGAGCCTGCTATGCAT | |
| TATCGTTGGTTCTGTGGCTTGGGGGCTTTATCCATTCCATTGTACAAGTAGCCCTTATCCTG | |
| CACTTGCCTTTCTGTGGCCCAAACCAGCTGGATAACTTCTTCTGTGATGTTCCACAGGTCAT | |
| CAAGCTGGCCTGCACCAATACCTTTGTGGTGGAGCTTCTGATGGTCTCCAACAGTGGCCTG | |
| CTCAGCCTGCTGTGCTTCCTGGGCCTTCTGGCCTCCTATGCAGTCATCCTCTGTCGTATAAG | |
| GGAGCACTCCTCTGAAGGAAAGAGCAAGGCTATTTCCACATGCACCACCCATATTATCATT | |
| ATATTTCTCATGTTTGGACCTGGTATTTTCATCTACACTTGCCCCTTCCAGGCTTTCCCAGC | |
| TGACAAGGTAGTTTCTCTTTTCCATACTGTCATCTTTCCTTTGATGAACCCTGTTATTTATA | |
| CGCTTCGCAACCAGGAGGTGAAAGCTTCCATGAGGAAGTTGTTAAGTCAACATATGTTTTG | |
| CTGA | |
| AOLFR129 sequences: | |
| MALYFSLILHGMSDLFFLSTGHPRASCRMEAMKILNQSQVSEFILLGLTSSQDVEFLLFALFSVI | (SEQ ID NO: 239) |
| YVVTVLGNLLIIVTVFNTPNLNTPMYFLLGNLSFVDMTLASFATPKVILNLLKKQKVISFAGCFT | |
| QIFLLHLLGGVEMVLLVSMAFDRYVAICKPLHYMTIMNKKVCVLLVVTSWLLGLLHSGFQIPF | |
| AVNLPFCGPNVVDSIFCDLPLVTKLACIDIYFVQVVIVANSGIISLSCFIILLISYSLILITIKNHSPT | |
| GQSKARSTLTAHITVVILFFGPCIFIYIWPFGNHSVDKFLAVFYTIITPILNPIIYTLRNKEMKISMK | |
| KLWRAFVNSREDT | |
| ATGGCTCTTTATTTTTCACTCATACTCCATGGTATGAGTGATCTTTTCTTTCTCTCTACAGG | (SEQ ID NO: 240) |
| TCATCCAAGAGCGAGCTGTAGGATGGAGGCCATGAAACTATTAAATCAATCTCAAGTGTC | |
| AGAATTCATTTTGCTGGGACTGACCAGCTCCCAGGATGTAGAGTTTCTTCTCTTTGCCCTCT | |
| TCTCGGTTATCTATGTGGTCACAGTTTTGGGTAACCTTCTTATTATAGTCACAGTGTTTAAC | |
| ACCCCTAACCTGAATACTCCCATGTATTTTCTCCTTGGTAATCTCTCTTTTGTAGATATGAC | |
| CCTTGCTTCTTTTGCCACCCCTAAGGTGATTCTGAACTTGTTAAAAAAGCAGAAGGTAATT | |
| TCTTTTGCTGGGTGCTTCACTCAGATATTTCTCCTTCACTTACTGGGTGGGGTTGAAATGGT | |
| ACTGTTGGTCTCCATGGCTTTTGACAGATATGTGGCCATTTGTAAGCCCCTACACTACATG | |
| ACCATCATGAACAAGAAGGTATGTGTTTTGCTTGTAGTGACCTCATGGCTCTTGGGTCTCC | |
| TTCACTCAGGGTTTCAGATACCATTGCTGTGAACTTGCCCTTTTGTGGTCCCAATGTGGTA | |
| GACAGCATTTTTTGTGACCTCCCTTTGGTTACTAAGCTTGCCTGTATAGACATATATTTTGT | |
| ACAGGTAGTCATTGTTGCCAACAGTGGCATAATCTCCCTGAGCTGTTTCATTATTTTGCTTA | |
| TCTCCTACAGTCTGATCCTCATAACCATTAAGAACCACTCTCCTACTGGGCAATCTAAAGC | |
| CCGTTCCACTTTGACTGGTCACATCACAGTGGTGATTCTCTTCTTTGGCCGATGCATCTTTA | |
| TCTACATTTGGCCCTTCGGCAACGAGTCTGTAGATAAGTTCCTTGCTGTGTTTTATACCATC | |
| ATCACTCCTATCTTGAATCCAATTATCTATACTCTGAGAAACAAAGAAATGAAGATATCCA | |
| TGAAAAAACTCTGGAGAGCTTTTGTGAATTCTAGAGAAGATACTTAG | |
| AOLFR131 sequences: | |
| MASTSNVTELIFTGLFQDPAVQSVCFVVFLPVYLATVVGNGLIVLTVSISKSLDSPMYFFLSCLS | (SEQ ID NO: 241) |
| LVEISYSSTIAPKFIIDLLAKIKTISLEGCLTQIFFFHFFGVAEILLIVVMAYDCYVAICKPLHYMNI | |
| ISRQLCHLLVAGSWLGGFCHSIIQILVIIQLPFCGPNVIDHYFCDLQPLFKLACTDTFMEGVIVLA | |
| NSGLFSVFSFLILVSSYIVILVNLRNHSAEGRHKALSTCASHITVVILFFGPAIFLYMRPSSTFTED | |
| KLVAVFYTVITPMLNPIIYTLRNAEVKIAIRRLWSKKENPGRE | |
| ATGGCCAGTACAAGTAATGTGACTGAGTTGATTTTCACTGGCCTTTTCCAGGATCCAGCTG | (SEQ ID NO: 242) |
| TGCAGAGTGTATGCTTTGTGGTGTTTCTCCCCGTGTACCTTGCCACGGTGGTGGGCAATGG | |
| CCTCATCGTTCTGACGGTCAGTATCAGCAAGAGTCTGGATTCTCCCATGTACTTCTTCCTTA | |
| GCTGCCTGTCCTTGGTGGAGATCAGTTATTCCTCCACTATCGCCCCTAAATTCATCATAGAC | |
| TTACTTGCCAAGATTAAAACCATCTCTCTGGAAGGCTGTCTGACTCAGATATTCTTCTTCCA | |
| CTTCTTTGGGGTTGCTGAGATCCTTTTGATTGTGGTGATGGCCTATGATTGCTACGTGGCC | |
| ATTTGCAAGCCTCTTCATTATATGAACATTATCAGTCGTCAACTGTGTCACCTTCTGGTGGC | |
| TGGTTCCTGGCTGGGGGGCTTTTGTCACTCCATAATTCAGATTCTCGTTATCATCCAATTGC | |
| CCTTCTGTGGTCCCAATGTGATTGACCACTATTTCTGTGACCTCCAGCCTTTATTCAAGCTT | |
| GCCTGCACTGACACCTTCATGGAGGGGGTTATTGTGTTGGCCAACAGTGGATTATTCTCTG | |
| TCTTCTCCTTCCTCATCTTGGTGTCCTCTTATATTGTCATTCTGGTCAACTTGAGGAACCAT | |
| TCTGCAGAGGGGAGGCACAAAGCCCTCTCCACCTGTGCTTCTCACATCACAGTGGTCATCT | |
| TGTTTTTTGGACCTGCTATCTTCCTCTACATGCGACCTTCTTCCACTTTCACTGAAGATAAA | |
| CTTGTGGCTGTATTCTACACGGTCATCACCCCCATGCTGAACCCCATCATTTACACACTCAG | |
| GAATGCAGAGGTGAAAATCGCCATAAGAAGATTGTGGAGCAAAAAGGAGAATCCAGGGA | |
| GGGAGTGA | |
| AOLFR132 sequences: | |
| MVATNNVTEIIFVGFSQNWSEQRVISVMFLLMYTAVVLGNGLIVVTILASKVLTSPMYFFLSYL | (SEQ ID NO: 243) |
| SFVEICYCSVMAPKLIFDSFIKRKVISLKGCLTQMFSLHFFGGTEAFLLMVMAYDRYVAICKPL | |
| HYMAIMNQRMCGLLVRIAWGGGLLHSVGQTFLIFQLPFCGPNIMDHYFCDVHPVLELACADT | |
| FFISLLIITNGGSISVVSFFVLMASYLIILHFLRSHNLEGQHKALSTCASHVTVVDLFFIPCSLVYIR | |
| PCVTLPADKIVAVFYTVVTPLLNPVIYSFRNAEVKNAMRRFIGGKVI | |
| ATGGTTGCTACAAACAATGTGACTGAAATAATTTTCGTGGGATTTTCCCAGAATTGGAGTG | (SEQ ID NO: 244) |
| AGCAGAGGGTCATTTCTGTGATGTTTCTCCTCATGTACACAGCTGTTGTGCTGGGCAATGG | |
| CCTCATTGTGGTGACCATCCTGGCCAGCAAAGTGCTCACCTCCCCCATGTATTTCTTTCTCA | |
| GCTACTTATCCTTTGTGGAGATCTGCTACTGTTCTGTCATGGCCCCCAAGCTTATCTTTGAC | |
| TCCTTTATCAAGAGGAAAGTCATTTCTCTCAAGGGCTGCCTCACACAGATGTTTTCCCTCC | |
| ATTTCTTTGGTGGCACTGAGGCCTTTCTCCTGATGGTGATGGCCTATGACCGCTATGTGGC | |
| CATCTGCAAGCCCTTGCACTACATGGCCATCATGAACCAGCGAATGTGTGGTCTCCTCGTG | |
| AGGATAGCATGGGGCGGGGGCCTGCTGCATTCTGTTGGGCAAACCTTCCTGATTTTCCAGC | |
| TCCCGTTCTGTGGCCCCAACATCATGGACCACTACTTCTGTGATGTCCACCCAGTGCTGGA | |
| GCTGGCCTGCGCAGACACCTTCTTCATTAGCCTGCTGATCATCACCAATGGCGGCTCCATC | |
| TCCGTAGTCAGTTTCTTCGTGCTGATGGCTTCCTACCTGATCATCCTGCACTTCCTGAGAAG | |
| CCACAACTTGGAGGGGCAGCACAAGGCCCTCTCCACCTGTGCCTCTCATGTCACAGTTGTC | |
| GACCTGTTCTTCATACCTTGCTCCTTGGTCTATATTAGGCCCTGTGTCACCCTCCCTGCAGA | |
| CAAGATAGTTGCTGTATTTTATACAGTGGTCACACCTCTCTTAAACCCTGTGATTTACTCCT | |
| TCAGGAATGCTGAAGTGAAAAATGCCATGAGGAGATTTATTGGGGGAAAAGTAATTTGA | |
| AOLFR133 sequences: | |
| MTEFIFLVLSPNQEVQRVCFVIFLFLYTAIVLGNFLIVLTVMTSRSLGSPMYFFLSYLSFMEICYS | (SEQ ID NO: 245) |
| SATAPKLISDLLAERKVISWWGCMAQLFFLHFFGGTEIFLLTVMAYDHYVAICKPLSYTTIMN | |
| WQVCTVLVGLAWVGGFMHSFAQILLIFHLLFCGPNVINHYFCDLVPLLKLACSDTFLIGLLIVAN | |
| GGTLSVISFGVLLASYMVILLHLRTWSSEGWCKALSTCGSHFAVVILFFGPCVFNSLRPSTTLPI | |
| DKMVAVFYTVITAILNPVIYSLRNAEMRIKAMKRLWIRTLRINEK | |
| ATGACTGAATTCATTTTTCTGGTACTTTCTCCCAACCAGGAGGTGCAGAGGGTTTGCTTTG | (SEQ ID NO: 246) |
| TGATATTTCTGTTCTTGTACACAGCAATTGTGCTGGGGAATTTCCTCATTGTGCTCACTGTC | |
| ATGACCAGCAGAAGCCTTGGTTCCCCCATGTACTTCTTCCTCAGCTACCTCTCCTTCATGGA | |
| GATCTGCTACTCCTCCGCTACAGCCCCCAAACTCATCTCAGATCTGCTGGCTGAAAGGAAA | |
| GTCATATCTTGGTGGGGCTGCATGGGACAGCTTTTCTTCTTGGACTTCTTTGGTGGCACTGA | |
| GATTTTCCTGCTCACTGTGATGGCCTATGACCACTATGTGGCCATCTGCAAGCCCCTCAGC | |
| TACACCACCATCATGAACTGGCAGGTGTGTACTGTCCTTGTAGGAATAGCATGGGTGGGA | |
| GGCTTCATGCATTCCTTTGCACAAATCCTTCTCATCTTCCACCTGCTCTTCTGTGGCCCCAA | |
| TGTGATCAATCACTATTTCTGTGACCTAGTTCCCCTTCTCAAACTTGCCTGCTCTGACACCT | |
| TCCTCATTGGTCTGCTGATTGTTGCCAATGGAGGCAGCCTGTCTGTGATCAGTTTTGGGGT | |
| CCTCTTAGCATCCTATATGGTCATCTTGCTCCATCTGAGAACGTGGAGCTCTGAAGGGTGG | |
| TGCAAAGCCCTCTCCACCTGTGGGTCCCATTTCGCTGTGGTTATCTTGTTCTTTGGGCCCTG | |
| CGTCTTCAACTCTCTGAGGCCTTCTACCACTCTGCCCATAGACAAGATGGTGGCTGTGTTCT | |
| ACACAGTGATAACCGCGATCCTGAACCCTGTCATCTACTCTCTGAGAAATGCTGAAATGAG | |
| GAAGGCCATGAAGAGGCTGTGGATTAGGACATTGAGACTAAATGAGAAATAG | |
| AOLFR134 sequences: | |
| MTTIILEVDNHTVTTRFILLGFPTRPAFQLLFFSIFLATYLLTLLENLLIILAIHsDGQLHKPMYFFL | (SEQ ID NO: 247) |
| SHLSFLEMWYVTVISPKMLVDFLSHDKSISFNGCMTQLYFFVTFVCTEYILLAIMAFDRYVATC | |
| NPLRYPVIMTNQLCGTLAGGCWFCGLMTAMIKMVFIAQLHYCGMPQINHYFCDISPLLNVSCE | |
| DASQAEMVDFFLALMVIAIPLCVVVASYAAILATILRIPSAQGRQKAFSTCASHLTVVILFYSMT | |
| LFTYARPKLMYAYNSNKVVSVLYTVIVPLLNPIIYCLRNHEVKAALRKTIHCRGSGPQGNGAFS | |
| S | |
| ATGACCACCATAATTCTGGAAGTAGATAATCATACAGTGACAACACGTTTCATTCTTCTGG | (SEQ ID NO: 248) |
| GGTTTCCAACACGACCAGCCTTCCAGCTTCTCTTTTTCTCCATTTTCCTGGCAACCTATCTG | |
| CTGACACTGCTGGAGAATCTTCTTATCATCTTAGCTATCCACAGTGATGGGCAGCTGCATA | |
| AGCCCATGTACTTCTTCTTGAGCGACCTCTCCTTCCTGGAGATGTGGTATGTCAGAGTCATC | |
| AGCCCCAAGATGCTTGTTGACTTCCTCAGTCATGACAAGAGTATTTCCTTCAATGGCTGCA | |
| TGACTCAACTTTACTTTTTTGTGACCTTTGTCTGCACTGAGTACATCCTTCTTGCTATCATG | |
| GCCTTTGACCGCTATGTAGCCATTTGTAATCCACTACGCTACCCAGTCATCATGACCAACC | |
| AGCTCTGTGGCACACTGGCTGGAGGATGCTGGTTCTGTGGACTCATGACTGCCATGATTAA | |
| GATGGTTTTTATAGCACAACTTCACTACTGTGGCATGCGTCAGATCAATCACTACTTTTGTG | |
| ATATCTCTCCACTCCTTAACGTGTGCTGTGAGGATGCCTCACAGGCTGAGATGGTGGACTT | |
| CTTCTTGGCCCTCATGGTCATTGGTATTCCTCTTTGTGTTGTGGTGGCATCCTACGCTGCTA | |
| TCCTTGCCACCATCCTCAGGATCCCTTCTGCTCAGGGCCGCCAAAAGGCATTCTCCACCTG | |
| TGCCTCCCAGCTGACCGTCGTAATTCTCTTCTATTCCATGACACTTTTCACCTATGCCCGTC | |
| CCAAACTCATGTATGCCTACAATTCCAACAAAGTGGTATCTGTTCTCTACACTGTCATTGTT | |
| CCACTGCTCAACCCCATCATTTACTGTCTGAGGAACCATGAAGTAAAGGCAGCCCTCAGAA | |
| AGACCATACATTGCAGAGGAAGTGGGCCCCAGGGAAATGGGGCTTTCAGTAGTTAA | |
| AOLFR135 sequences: | |
| MIFPSHDSQAFTSVDMEVGNCTILTEFILLGFSADSQWQPILFGVFLMLYLITLSGNMTLVILIRT | (SEQ ID NO: 249) |
| DSHLHTPMYFFIGNLSFLDFWYTSVYTPKILASCVSEDKRISLAGCGAQLFFSCVVAYTECYLL | |
| AAMAYDRHAAICNPLLYSGTMSTALCTGLVAGSYIGGFLNAIAHTANTFRIHFCGKNIIDHFFC | |
| DAPPLVKMSCTNTRVYEKVLLGVVGFTVLSSILAILISYVNILLAILRIHSASGRHKAFSTCASHL | |
| ISVMLFYGSLLFMYSRPSSTYSLERDKVAALFYTVINPLLNPLIYSLRNKDIKEAFRKATQTIQPQ | |
| T | |
| ATGATTTTCCCTTCTCATGATAGTCAGGCTTTCACCTCCGTGGACATGGAAGTGGGAAATT | (SEQ ID NO: 250) |
| GCACCATCCTGACTGAATTCATCTTGTTTGGGTTTCTCAGCAGATTCCCAGTGGCAGCCGAT | |
| TCTATTTGGAGTGTTTCTGATGCTCTATTTGATAACCTTGTCAGGAAACATGACCTTGGTTA | |
| TCTTAATCCGAACTGATTCCCACTTGCATACACCTATGTACTTTTTCATTGGCAATCTGTCT | |
| TTTTTGGATTTCTGGTATACCTCTGTGTATACCCCCAAAATCCTGGCCAGTTGTGTCTCAGA | |
| AGATAAGCGCATTTCCTTGGCTGGATGTGGGGCTCAGCTGTTTTTTTCCTGTGTTGTAGCCT | |
| ACACTGAATGCTATCTCCTGGCAGCCATGGCATATGACCGCCATGCAGCAATTTGTAACCC | |
| ATTGCTTTATTCAGGTACCATGTCCACCGCCCTCTGTACTGGGCTTGTTGCTGGCTCCTACA | |
| TAGGAGGATTTTTGAATGCCATAGCCCATACTGCCAATACATTCCGCCTGCATTTTTGTGG | |
| TAAAAATATCATTGACCACTTTTTCTGTGATGCACCACCATTGGTAAAAATGTCCTGTACA | |
| AACACCAGGGTCTACGAAAAAGTCCTGCTTGGTGTGGTGGGCTTCAGAGTACTCTCCAGCA | |
| TTCTTGCTATCCTGATTTCCTATGTCAACATCCTCCTGGCTATCCTGAGAATCCACTCAGCT | |
| TCAGGAAGACACAAGGCATTCTCCACCTGTGCTTCCCACCTCATCTCAGTCATGCTCTTCTA | |
| TGGATCATTGTTGTTTATGTATTCAAGGCCTAGTTCCACCTACTCGCTAGAGAGGGACAAA | |
| GTAGCTGCTCTGTTCTACACCGTGATCAACCCACTGCTCAACCCTCTCATCTATAGCCTGAG | |
| AAACAAAGATATCAAAGAGGCCTTCAGGAAAGCAACACAGACTATACAACCACAAACATG | |
| A | |
| AOLFR136 sequences: | |
| MTMENYSMAAQFVLDGLTQQAELQLPLFLLFLGIYVVTVVGNLGMILLIAVSPLLHTPMYYFL | (SEQ ID NO: 251) |
| SSLSFVDFCYSSVITPKMLVNFLGKKNTILYSECMVQLFFFVVFVVAEGYLLTAMAYDRYVAIC | |
| SPLLYNAIMSSWVCSLLVLAAFFLGFLSALTHTSAMMKLSFCKSHIINHYFCDVLPLLNLSCSNT | |
| HLNELLLFIIAGFNTLVPTLAVAVSYAFILYSILHIRSSEGRSKAFGTCSSHLMAVVIFFGSITFMY | |
| FKPPSSNSLDQEKVSSVFYTTVIPMLNPLIYSLRNKDVKKALRKVLVGK | |
| ATGACCATGGAAAATTATTCTATGGCAGCTCAGTTTGTCTTAGATGGTTTAACACAGCAAG | (SEQ ID NO: 252) |
| CAGAGCTCCAGCTGCCCCTCTTCCTCCTGTTCCTGGGAATCTATGTGGTCACAGTAGTGGG | |
| CAACCTGGGCATGATTCTCCTGATTGCAGTCAGCCCTCTACTTCACACCCCCATGTACTATT | |
| TCCTCAGCAGCTTGTCCTTCGTCGATTTCTGCTATTCCTCTGTCATTACTCCCAAAATGCTG | |
| GTGAACTTCCTAGGNAAGAAGAATACAATCCTTTACTCTGAGTGCATGGTCCAGCTCTTTT | |
| TCTTTGTGGTCTTTGTGGTGGCTGAGGGTTACCTCCTGACTGCCATGGCATATGATGGCTA | |
| TGTTGCCATCTGTAGCCCACTGCTTTATAATGCGATCATGTCCTCATGGGTCTGCTCACTGG | |
| TAGTGCTGGCTGCCTTCTTCTTGGGCTTTCTCTCTGCCTTGACTCATACAAGTGCCATGATG | |
| AAACTGTCCTTTTGGAAATCCCACATTATCAACCATTACTTCTGTGATGTTCTTCCCCTCCT | |
| CAATCTCTCCTGCTCCAACACACACCTCAATGAGCTTCTACTTTTTATCATTGCGGGGTTTA | |
| ACACCTTGGTGCCCACCCTAGCTGTTGCTGTCTCCTATGCCTTCATCCTCTACAGCATCCTT | |
| CACATCCGCTCCTCAGAGGGCCGGTCCAAAGCTTTTGGAACATGCAGCTCTCATCTCATGG | |
| CTGTGGTGATCTTCTTTGGGTCCATTACCTTCATGTATTTCAAGCCCCCTTCAAGTAACTCC | |
| CTGGACCAGGAGAAGGTGTCCTCTGTGTTCTACACCACGGTGATCCCCATGCTGAACGCTT | |
| TAATATACAGTCTGAGGAATAAGGATGTGAAGAAAGCATTAAGGAAGGTGTTAGTAGGAA | |
| AATGA | |
| AOLFR137 sequences: | |
| MSPENQSSVSEFLLLGLPIRPEQQAVFFALFLGMYLTTVLGNLLIMLLIQLDSHLHTPMYFFLSH | (SEQ ID NO: 253) |
| LALTDISFSSVTVPKMLMNMQTQHLAVFYKGCISQTYFFIFFADLDSFLITSMAYDRYVAIGHPL | |
| HYATIMTQSQCVMLVAGSWVIACACALLHTLLLAQLSFCADHIIPHYFCDLGALLKISCSDTSL | |
| NQLAIFTAALTAIMLPFLCILVSYGHIGVTILQIPSTKGICKALSTCGSHLSVVTIYYRTIIGLYFLP | |
| PSSNTNDKNIIASVIYTAVTPMLNPFIYSLRNKDIKGALRKILSRSGAVAHACNLSTLGG | |
| ATGAGCCCTGAGAACCAGAGCAGCGTGTCCGAGTTCCTCCTCCTGGGCGTCCCCATCCGGC | (SEQ ID NO: 254) |
| CAGAGCAGCAGGCCGTGTTCTTCGCCCTGTTCCTGGGCATGTACCTGACCACGGTGCTGGG | |
| GAACCTGCTCATCATGCTGCTCATCCAGCTAGACTCTCACCTTCACACCCCCATGTACTTCT | |
| TCCTTAGCCACTTGGCCCTCACTGACATCTCCTTTTCATCTGTCACTGTCCCTAAGATGCTG | |
| ATGAACATGCAGACTCAGCACCTAGCCGTCTTTTACAAGGGATGCATITTCACAGACATATT | |
| TTTTCATATTTTTGCTGACTTAGACAGTTTCCTTATCACTTCAATGGCATATGACAGGTAT | |
| GTGGCCATCTGTCATCCTCTACATTATGCCACCATCATGACTCAGAGCCAGTGTGTCATGC | |
| TGGTGGCTGGGTCCTGGGTCATCGCTTGTGCGTGTGCTCTTTTGCATACCCTCCTCCTGGCC | |
| CAGCTTTCCTTCTGTGGTGACCACATCATCCGTCACTACTTCTGTGAGCTTGGTGCCCTGCT | |
| CAAGTTGTCCTGCTCAGACACCTCCCTCAATCAGTTAGCAATCTTTACAGCAGCATTGACA | |
| GCCATTATGCTTGCATTCCTGTGCATCCTGGTTTCTTATGGTCACATTGGGGTCACCATCCT | |
| CCAGATTCCCTCTACCAAGGGCATATGCAAAGCCTTGTCCACTTGTGGATCCGACCTCTCA | |
| GTGGTGACTATCTATTATCGGACAATTATTGGTCTCTATTTTCTTCCCCCATCCAGCAACAC | |
| CAATGACAAGAACATAATTGGTTCAGTGATATACACAGCAGTCACTCCCATGTTGAACCCA | |
| TTCATTTACAGTCTGAGAAATAAAGACATTAAGGGAGCCCTAAGAAAACTCTTGAGTAGG | |
| TCAGGCGCAGTGGGTCATGCGTGTAATCTCAGCACTTTGGGAGGCTGA | |
| AOLFR138 sequences: | |
| MLNFTDVTEFILLGLTSRREWQVLFFIVFLVVYIITVVGNIGMMLLIKVSPQLNSPMYFFLSHLS | (SEQ ID NO: 255) |
| FVDVWFSSNVTPKMLENLFSDKKTTSYADCLAQCFFFIALVHVEIFILAAIAFDRYTVIGNPLLY | |
| GSKMSRGVCIRLITFPYIYGFLTSLTATLWTYGLYFCGKIEINHFYCADPPLIKIVIACAGTFVKEY | |
| TMLILAGINFTYSLTVIIISYLFILIAILRMRSAEGRQKAFSTCGSHPTAVIIFYGTLIFMYLRRPTE | |
| ESVEQGKMVAVFYTTVIPMLNPMIYSLRNKDVKKAMMKVISRSC | |
| ATGCTCAATTTCACCGATGTGACAGAGTTCATTCTTTTGGGGCTAACGAGCCGTCGGGAAT | (SEQ ID NO: 256) |
| GGCAAGTTCTCTTCTTCATCGTTTTTCTTGTGGTCTACATTATCACCGTGGTGGGCAATATC | |
| GGCATGATGTTGTTAATCAAGGTCAGTCCTCAGCTTAACAGCCCCATGTACTTTTTCCTCA | |
| GTCACTTGTCATTTGTTGATGTGTGGTTTTCTTCCAATGTCACCCCTAAAATGTTGGaAAAT | |
| CTGTTATCAGATAAAAAAACAATTTGTTATGCTGGCTGTTTAGCACAGTGTTTCTTCTTCAT | |
| TGCTGTTGTCCATGTGGAAATTTTTATTCTTGCTGCGATTGCCTTTGATAGATACACAGTGA | |
| TTGGAAATCCTTTGCTTTATGGCAGCAAAATGTCAAGGGATGTCTGTATTCGACTGATTAC | |
| TTTCCCTTACATTTATGGTTTTCTGACGAGTCTGACAGCAACATTATGGACTTATGGCTTGT | |
| ACTTCTGTGGAAAAATTGAGATCAACCATTTCTACTGTGCAGATCCACCTCTCATCAAAAT | |
| GGCCTGTGCCGGGACCTTTGTAAAGAATATACAATGCTCATACTTGCCGGCATCAACTTC | |
| ACATATTCCCTGACTGTAATTATCATCTCTTACTTATTCATCCTCATTGCCATTCTGCGAAT | |
| GCGCTCAGCAGAAGGAAGGCAGAAGGCCTTTTCCACATGTGGGTCCCATCTGACAGCTGT | |
| CATCATATTCTATGGTACTCTGATCTTCATGTATCTCAGACGTCCCACAGAGGAGTCTGTG | |
| GAGCAGGGGAAGATGGTGGCTGTGTTCTATACCACAGTGATCCCCATGTTGAATCCCATGA | |
| TCTACAGTCTGAGGAACAAGGATGTGAAAAAGGCCATGATGAAAGTGATCAGCAGATCAT | |
| GTTAA | |
| AOLFR139 sequences: | |
| MGFPGIHSWQHWLSLPLALLYLLALSANILILIIINKEAALHQPMYYELGILAMADIGLATTIMP | (SEQ ID NO: 257) |
| KILAILWFNAKTISLLECFAQMYAIHCFVAMESSTFVCMAIDRYVAICRPLRYPSIITESFVFKAN | |
| GFMALRNSLCLISVPLLAAQRHYCSQNQIEHCLCSNLGVTSLSCDDRRINSINQVLLAWTLMGS | |
| DLGLIILSYALILYSVLKLNSPEAASKALSTCTSHLILILFFYTVIIVISITRSTGMRVPLIPVLLNVL | |
| HNVIPPALNPMVYALKNKELRQGLYKVLRIGVKGT | |
| ATGGGATTCCCTGGCATTCACAGTTGGCAGCACTGGCTCTCCCTGCCCCTGGCTCTGCTCT | (SEQ ID NO: 258) |
| ACCTCTTAGCTCTCAGTGCCAACATCCTTATCCTGATCATCATCAACAAAGAGGCAGCACT | |
| GCACCAGCCTATGTACTATTTCCTGGGCATCTTGGCTATGGCAGACATAGGCCTGGCTACC | |
| ACCATCATGCCTAAGATTTTGGCCATCTTATGGTTCAATGCTAAGACCATCAGTGTCCTGG | |
| AGTGCTTTGCTCAGATGTATGCCATACATTGCTTTGTGGCCATGGAATCAAGTACCTTTGT | |
| CTGCATGGCTATTGATAGATATGTAGCCATTTGTCGACCGCTACGATATCCATCAATCATC | |
| ACTGAATCTTTTGTTTTCAAAGCAAATGGGTTCATGGCACTGAGAAAGAGCCTGTGTCTCA | |
| TCTCAGTGCCTCTGTTGGCTGCCCAGAGGCATTACTGCTCCCAGAATCAAATTGAGCACTG | |
| TCTTTGTTCTAACCTTGGAGTCACTAGCCTATCTTGTGATGATCGAAGAATCAATAGCATT | |
| AACCAGGTCCTTTTGGCTTGGACACTCATGGGAAGTGACCTGGGTTTGATTATTTTATCAT | |
| ATGCTCTAATACTTTACTCTGTCCTGAAGCTGAACTCTCCAGAAGCTGCATCCAAGGCCTT | |
| AAGTACCTGCACCTCCCACCTCATCTTAATCCTTTTCTTCTACACAGTCATCATTGTGATTT | |
| CCATTACTCGTAGTACAGGAATGAGAGTTCCCCTTATTCCAGTTCTACTTAATGTGCTACA | |
| CAATGTCATTCCCCCTGCCCTGAACCCCATGGTATATGCACTCAAGAACAAGGAACTCAGG | |
| CAAGGCTTATACAAGGTACTTAGACTGGGAGTGAAGGGCACCTGA | |
| AOLFR140 sequences: | |
| MLTLNKTDLIPASFILNGVPGLEDTQLWISFPFCSMYVVAMVGNCGLLYLIHYEDALHKPMYY | (SEQ ID NO: 259) |
| FLAMLSFTDLVMCSSTIPKALCIFWFHLKDIGFDECLVQMFFIHTFTGMESGVLMLMALDRYV | |
| AICYPLRYSTILTNPVIAKVGTATFLRGVLLIIPFTFLTKRLPYCRGNILPHTYCDHMSVAKLSCG | |
| NVKVNAIYGLMVALLIGGFDILCITISYTMILRAVVSLSSADARQKAFNTCTAHICAIVFSYTPAF | |
| FSFFSHRFGEHIIPPSCHIIVANIYLLLPPTMNPIVYGVKTKQIRDCVIRILSGSKDTKSYSM | |
| ATGCTAACACTGAATAAAACAGACCTAATACCAGCTTCATTTATTCTGAATGGAGTCCCAG | (SEQ ID NO: 260) |
| GACTGGAAGACACACAACTCTGGATTTCCTTCCCATTCTGCTCTATGTATGTTGTGGCTAT | |
| GGTAGGGAATTGTGGACTCCTCTACCTCATTCACTATGAGGATGCCCTGCACAAACCCATG | |
| TACTACTTCTTGGCCATGCTTTCCTTTACTGACCTTGTTATGTGCTCTAGTACAATCCCTAA | |
| AGCCCTCTGCATCTTCTGGTTTCATCTCAAGGACATTGGATTTGATGAATGCCTTGTCCAG | |
| ATGTTCTTCATCCACACCTTCACAGGGATGGAGTCTGGGGTGCTTATGCTTATGGCCCTGG | |
| ATCGCTATGTGGCCATCTGCTACCCCTTACGCTATTCAACTATCCTCACCAATCCTGTAATT | |
| GCAAAGGTTGGGACTGCCACCTTCCTGAGAGGGGTATTACTCATTATTCCCTTTACTTTCCT | |
| CACCAAGCGCCTGCCCTACTGCAGAGGCAATATACTTCCCCATACCTACTGTGACCACATG | |
| TCTGTAGCCAAATTGTCCTGTGGTAATGTCAAGGTCAATGCCATCTATGGTCTGATGGTTG | |
| CCCTCCTGATTGGGGGCTTTGACATACTGTGTATCACCATCTCCTATACCATGATTCTCCGG | |
| GCAGTGGTCAGCCTCTCCTCAGCAGATGCTCGGCAGAAGGCCTTTAATACCTGCACTGCCC | |
| ACATTTGTGCCATTGTTTTCTCCTATACTCCAGCTTTCTTCTCCTTCTTTTCCCACCGCTTTG | |
| GGGAACACATAATCCCCCCTTCTTGCCACATCATTGTAGCCAATATTTATCTGCTCCTACCA | |
| CCCACTATGAACCCTATTGTCTATGGGGTGAAAACCAAACAGATACGAGACTGTGTCATAA | |
| GGATCCTTTCAGGTTCTAAGGATACCAAATCCTACAGCATGTGA | |
| AOLFR141 sequences: | |
| MSSTLGHNMESPNTITDVDPSVFFLLGIPGLEQFHLWLSLPVCGLGTATIVGNITILVVVATEPVL | (SEQ ID NO: 261) |
| HKPVYLFLCMLSTIDLAASVSTVPKLLAIFWCGAGHISASACLAQMFFIHAYCMMESTVLLAM | |
| AFDRYVAICHPLRYATILTDTIIAHIGVAAVVRGSLLMLPCPFLIGRLNFCQSHVILHTYCEHMA | |
| VVKLACGDTRPNRVYGLTAALLVIGVDLFCIGLSYALSAQAVLRLSSHEARSKALGTCGSHVC | |
| VILISYTPALFSFFTHRFGHHVPVHIHILLANVYLLLPPALNPVVYGVKTKQIRKRVVRVFQSGQ | |
| GMGIKASE | |
| ATGTCCAGCACTCTTGGCCACAACATGGAATCTCCTAATCACACTGATGTTGACCCTTCTG | (SEQ ID NO: 262) |
| TCTTCTTCCTCCTGGGCATCCCAGGTCTGGAACAATTTCATTTGTGGCTCTCACTCCCTGTG | |
| TGTGGCTTAGGCACAGCCACAATTGTGGGCAATATAACTATTCTGGTTGTTGTTGCCACTG | |
| AACCAGTCTTGCACAAGCCTGTGTACCTTTTTCTGTGCATGCTCTCAACCATCGACTTGGCT | |
| GCCTCTGTCTCCACAGTTCCCAAGCTACTGGCTATCTTCTGGTGTGGAGCCGGACATATAT | |
| CTGCCTCTGCCTGCCTGGCACAGATGTTCTTCATTCATGCCTTCTGCATGATGGAGTCCACT | |
| GTGCTACTGGCCATGGCCTTTGATCGCTACGTGGCCATCTGCCACCCAGTCCGCTATGCCA | |
| CAATCCTGACTGACACCATCATTGCCCACATAGGGGTGGCAGCTGTAGTGCGAGGCTCCCT | |
| GCTCATGCTCCCATGTCCCTTCCTTATTGGGCGTTTGAACTTCTGCCAAAGCCATGTGATCC | |
| TACACACGTACTGTGAGCACATGGCTGTGGTGAAGCTGGCCTGTGGAGACACCAGGCCTA | |
| ACCGTGTGTATGGGCTGACAGCTGCACTGTTGGTCATTGGGGTTGACTTGTTTTGCATTGG | |
| TCTCTCCTATGCCCTAAGTGCACAAGCTGTCCTTCGCCTCTCATCCCATGAAGCTCGGTCCA | |
| AGGCCCTAGGGACCTGTGGTTCCCATGTCTGTGTCATCCTCATCTCTTATACACCAGCCCTC | |
| TTCTCCTTTTTTACACACCGCTTTGGCCATCACGTTCCAGTCCATATTCACATTCTTTTGGC | |
| CAATGTTTATCTGCTTTTGCCACCTGCTCTTAATCCTGTGGTATATGGAGTTAAGACCAAAC | |
| AGATCCGTAAAAGAGTTGTCAGGGTGTTTCAAAGTGGGCAGGGAATGGGCATCAAGGCAT | |
| CTGAGTGA | |
| AOLFR143 sequences: | |
| MLGLNGTPFQPATLQLTGIPGIQTGLTWVALIFCILYMISIVGNLSILTLVFWEPALHQPMYYFL | (SEQ ID NO: 263) |
| SMLALNDLGVSFSTLPTVISTFCFNYNHVAYNACLVQMFFIHTFSFMESGILLAMSLDRFVAICY | |
| PLRYVTVLTHNRILAMGLGILTKSFTTLFPFPFVVKRLPFCKGNVLHHSYCLHPDLMKVACGDI | |
| HVNNIYGLLVIIFTYGMDSTFILLSYALILRAMLVIISQEQRLKALNTCMSHICAVLAFYVPIIAVS | |
| MIHRFWKSAPPVVHVMMSNVYLFVPPMLNPIIYSVKTKEIRKGILKFFHKSQA | |
| ATGCTGGGTCTCAATGGCACCCCCTTCCAGCCAGCAACACTCCAGCTGACAGGCATTCCTG | (SEQ ID NO: 264) |
| GGATACAAACAGGCCTCACCTGGGTTGCCCTGATTTTGTGCATCCTCTACATGATCTCCATT | |
| GTAGGTAACCTCAGCATTCTCACTCTGGTGTTTTGGGAGCCTGCTCTGCATCAGCCCATGT | |
| ACTACTTCCTCTCTATGCTCGCTCTCAATGATCTGGGAGTGTCCTTTTCTACACTTCCCACT | |
| GTGATTTCTACTTTCTGCTTCAACTACAACGATGTTGCGTTTAATGCTTGCCTGGTCCAGAT | |
| GTTCTTCATCCACACTTTCTCCTTCATGGAGTCAGGCATACTGCTGGCCATGAGCTTGGATC | |
| GCTTTGTGGCTATTTGTTATCCATTACGCTATGTCACTGTGCTCACTCACAACCGTATATTG | |
| GCTATGGGTCTGGGCATGCTTACCAAGAGTTTCACCACTCTCTTCCCTTTCCCTTTTGTGGT | |
| GAAACGACTGCCGTTCTGCAAAGGCAATGTTTTGCATCACTCCTACTGTCTCCATGCAGAT | |
| CTCATGAAAGTAGCATGTGGAGACATCCATGTTAACAACATTTATGGGCTCTTGGTGATCA | |
| TTTTTACCTATGGTATGGACTCAACTTTCATCCTGCTTTCCTACGCATTGATCCTGAGAGCC | |
| ATGCTGGTCATCATATCCCAGGAACAGCGGCTCAAGGCACTCAACACCTGCATGTCACACA | |
| TCTGTGCAGTGCTGGCCTTTTATGTGCCCATAATTGCTGTCTCCATGATTCACCGCTTCTGG | |
| AAAAGTGCTCCACCTGTTGTTCATGTCATGATGTCCAATGTCTACCTGTTTGTACCACCCAT | |
| GCTCAACCCTATCATCTACAGTGTGAAAACCAAGGAGATCCGCAAAGGGATTCTCAAGTTC | |
| TTCCATAAATCCCAGGCCTGA | |
| AOLFR144 sequences: | |
| MGLFNVTHPAFFLLTGIPGLESSHSWLSGPLCVMYAVALGGNTVILQAVRVEPSLHEPMYYFL | (SEQ ID NO: 265) |
| SMLSFSDVAISMATLPTVLRTFCLNARNITFDACLIQMFLIHFFSMMESGILLAMSFDRYVAICD | |
| PLRYATVLTTEVIAAMGLGAAARSFITLFPLPFLIKRLPICRSNVLSHSYCLHPDMMRLACADISI | |
| NSIYGLFVLVSTFGMDLFFIFLSYVLILRSVMATASREERLKALNTCVSHILAVLAFYVPMIGVS | |
| TVHRFGKHVPCYIHVLMSNVYLFVPPVLNPLIYSAKTKEIRRAIFRMFHHIKI | |
| ATGGGGTTGTTCAATGTCACTCACCCTGCATTCTTCCTCCTGAGTGGTATCCCTGGTCTGGA | (SEQ ID NO: 266) |
| GAGCTCTCACTCCTGGCTGTCAGGGCCCCTCTGCGTGATGTATGCTGTGGCCCTTGGGGGA | |
| AATACAGTGATGCTGCAGGCTGTGCGAGTGGAGCCCAGCCTCCATGAGCCCATGTACTACT | |
| TCCTGTCCATGTTGTCCTTCAGTGATGTGGCCATATCCATGGCCACACTGCCCAGTGTAGTC | |
| CGAACCTTCTGCCTCAATGCCCGCAACATCACTTTTGATGCCTGTCTAATTCAGATGTTTCT | |
| TATTCAGTTCTTCTCCATGATGGAATCAGGTATTCTGCTGGCCATGAGTTTTGACCGCTATG | |
| TGGCCATTTGTGACCCCTTGCGCTATGCAACTGTGCTCACCACTGAAGTCATTGCTGCAAT | |
| GGGTTTAGGTGCAGCTGCTCGAAGCTTCATCACCCTTTTCCCTCTTCCCTTTCTTATTAAGA | |
| GGCTGCCTATCTGCAGATCCAATGTTCTTTCTCACTCCTACTGCCTGCACCCAGACATGATG | |
| AGGCTTGCCTGTGCTGATATCAGTATCAACAGCATCTATGGACTCTTTGTTCTTGTATCCAC | |
| CTTTGGCATGGACCTGTTTTTTATCTTCCTCTCCTATGTGCTCATTCTGCGTTCTGTCATGG | |
| CCACTGCTTCCCGTGAGGAACGGCTCAAAGCTCTCAACACATGTGTGTCACATATCCTGGC | |
| TGTACTTGCATTTTATGTGCCAATGATTGGGGTCTCCACAGTGCACCGCTTTGGGAAGCAT | |
| GTCCGATGCTACATACATGTCCTCATGTCAAATGTGTACCTATTTGTGCCTCCTGTGCTCAA | |
| CCCTCTCATTTATAGCGCCAAGACAAAGGAAATCCGCCGAGCCATTTTCCGCATGTTTCAC | |
| CACATCAAAATATGA | |
| AOLFR145 sequences: | |
| MSVQYSLSPQFMLLSNITQFSPIFYLTSFPGLEGIKHWIFIPFFFMYMVAISGNCFILIIIKTNPRLH | (SEQ ID NO: 267) |
| TPMYYLLSLLALTDLGLCVSTLPTTMGIFWFNSQSIYFGACQIQMFCIHSFSFMESSVLLMMSFD | |
| RFVAIGHPLRYSVIITGQQVVRAGLIVIFRGPVATIPIVLLLKAYPYCGSVVLSHSFCLHQEVIQLA | |
| CTDTTFNNLYGLMVVVFTVMLDLVLIALSYGLILHTVAGLASQEEQRRAFQTCTAHLCAVLVF | |
| FVPMMGLSLVHRFGKHAPPAIHLLMANVYLFVPPMLNPIIYSIKTKEIHRAIIKLLGLKKASK | |
| ATGTCAGTCCAATATTCGCTCAGTCCTCAATTCATGCTGCTATCCAACATTACTCAGTTTAG | (SEQ ID NO: 268 |
| CCCCATATTCTATCTCACCAGCTTTCCTGGATTGGAAGGCATCAAACACTGGATTTTCATCC | |
| CCTTTTTCTTTATGTACATGGTTGCCATCTCAGGCAATTGTTTCATTCTGATCATTATTAAG | |
| ACCAACCCTCGTCTGCACACACCCATGTACTATCTACTATCCTTGCTGGCCCTCACTGACCT | |
| GGGGCTGTGTGTGTCCACGTTGCCCACCACTATGGGGATCTTCTGGTTTAACTCCCAGAGT | |
| ATCTACTTTGGAGCGTGTCAAATGCAGATGTTCTGGATCCACTCTTTTTCCTTGATGGAGTC | |
| CTCAGTGCTCCTCATGATGTCCTTTGACCGCTTTGTGGCCATCTGCCACCCTCTGAGGTATT | |
| CGGTCATTATCACTGGCCAGCAAGTGGTCAGAGCAGGCCTAATTGTCATCTTCCGGGGACC | |
| TGTGGCCACTATCCCTATTGTCCTCCTCCTGAAGGCTTTTCCCTACTGTGGATCTGTGGTCC | |
| TCTCCCACTCATTTTGCCTGCACCAGGAAGTGATACAGCTGGCCTGCACAGATACCACCTT | |
| CAATAATCTGTATGGACTGATGGTGGTAGTTTTCAGTGTGATGCTGGACCTGGTGGTCATC | |
| GCACTGTCCTATGGACTCATCCTGCACACAGTAGCAGGCCTGGCCTCCCAAGAGGAGCAGC | |
| GCCGTGCCTTTCAGACATGCACCGCTGATCTCTGTGCTGTGCTAGTATTCTTTGTGCCCATG | |
| ATGGGGCTGTCCCTGGTGCACCGTTTTGGGAAGCATGCCCCACCTGCTATTCATCTTCTTAT | |
| GGCCAATGTCTACCTTTTTGTGCCTCCCATGCTTAACCCAATCATATACAGCATTAAGACC | |
| AAGGAGATCCACCGTGCCATTATCAAACTCCTAGGTCTTAAAAAGGCCAGTAAATGA | |
| AOLFR146 sequences: | |
| MSQVTNTTQEGIYFILTDIPGFEASHIWISIPVCCLYTISIMGNTTILTVIRTEPSVHQRMYLFLSM | (SEQ ID NO: 269) |
| LALTDLGLTLTTLPTVMQLLWFNVRRISSEACFAQFFFLHGFSFMESSVLLAMSVDCYVAICCP | |
| LHYASILTNEVIGRTGLAIICCCVLAVLPSLFLLKRLPFCHSHLLSRSYCLHQDMIRLVCADIRLN | |
| SWYGFALALLIIIVDPLLIVISYTLILKNILGTATWAERLRALNNCLSHILAVLVLYIPMVGVSMT | |
| HRFAKHASPLVHVIMANIYLLAPPVMNPIIYSVKNKQIQWGMLNFLSLKNMHSR | |
| ATGTCCCAGGTGACTAACACCACACAAGAAGGCATCTACTTCATCCTCACGGACATCCCTG | (SEQ ID NO: 270) |
| GATTTGAGGCCTCCCACATGTGGATCTCCATCCCCGTCTGCTGTCTCTACACCATCTCCATC | |
| ATGGGCAATACCACCATCCTCACTGTCATTCGCACAGAGCCATCTGTCCACCAGCGCATGT | |
| ATCTGTTTCTCTCCATGCTGGCCCTGACGGACCTGGGTCTCACCCTCACCACCCTACCCACA | |
| GTCATGCAGCTTCTCTGGTTCAACGTTCGTAGAATCAGCTCTGAGGCCTGTTTTGCTCAGTT | |
| TTTCTTCCTTCATGGATTCTCCTTTATGGAGTCTTCTGTCCTCCTGGCTATGTCCGTTGACT | |
| GCTATGTGGCCATCTGCTGTCCCCTCCATTATGCCTCCATCCTCACCAATGAAGTCATTGGT | |
| AGAACTGGGTTAGCCATCATTTGCTGCTGTGTTCTGGCGGTTGTTCCCTCCCTTTTCTTACT | |
| CAAGCGACTGCCTTTCTGCCACTCCCACCTTCTCTCTCGCTCCTATTGCCTCCACCAGGATA | |
| TGATCCGCCTGGTCTGTGCTGACATCAGGCTCAACAGCTGGTATGGATTTGCTCTTGCCTT | |
| GCTCATTATTATCGTGGATCCTCTGCTCATTGTGATCTCCTATACACTTATTCTGAAAAATA | |
| TCTTGGGCACAGCCACCTGGGCTGAGCGACTCCGTGCCCTCAATAACTGCCTGTCCCACAT | |
| TCTAGCTGTCCTGGTCCTCTACATTCCCATGGTTGGTGTATCTATGACTCATCGCTTTGCCA | |
| AGCATGCCTCTCCACTGGTCCATGTTATCATGGCCAATATCTACCTGCTGGCACCCCCGGT | |
| GATGAACCCCATCATTTACAGTGTAAAGAACAAGCAGATCCAATGGGGAATGTTAAATTTC | |
| CTTTCCCTCAAAAATATGCATTCAAGATGA | |
| AOLFR147 sequences: | |
| MPSASAMIIFNLSSYNPGPFILVGIPGLEQFHVWIGIPFCIIYIVAVVGNCILLYLIVVEHSLHEPMF | (SEQ ID NO: 271) |
| FFLSMLAMTDLILSTAGVVPKALSIFWLGAREITFPGCLTQMFFLHYNFVLDSAILMAMAFDHYV | |
| AICSPLRYTTILTPKTIIKSAMGISFRSFCIILPDVFLLTCLPFCRTPIIPHTYCEHIGVAQLACADISI | |
| NFWYGFCVPIMTVISDVILIAVSYAHILCAVFGLPSQDACQKALGTCGSHVCVILMFYTPAFFSI | |
| LAHRFGHNVSRTFHIMFANLYIVIPPALNPMVYGVKTKQIRDKVILLFSKGTG | |
| ATGCCATCTGCCTCTGCCATGATCATTTTCAACCTGAGCAGTTACAATCCAGGACCCTTCAT | (SEQ ID NO: 272) |
| TCTGGTAGGGATCCCAGGCCTGGAGCAATTCCATGTGTGGATTGGAATTCCCTTCTGTATC | |
| ATCTACATTGTAGCTGTTGTGGGAAACTGCATCCTTCTCTAGCTCATTGTGGTGGAGCATA | |
| GTCTTCATGAACCCATGTTCTTCTTTCTCTCCATGCTGGCCATGACTGACCTCATCTTGTCC | |
| ACAGCTGGTGTGCCTAAAGCACTCAGTATCTTTTGGCTAGGGGCTCGCGAAATCACATTCC | |
| CAGGATGCCTTACACAAATGTTCTTCCTTCACTATAACTTTGTCCTGGATTCAGCCATTCTG | |
| ATGGCCATGGCATTTGATCACTATGTAGCTATCTGTTCTCCCTTGAGATATACCACCATCTT | |
| GAGTCCCAAGACCATCATCAAGAOTGCTATGGGCATCTGCTTTCGAAGCTTCTGCATCATG | |
| CTGCCAGATGTATTCTTGCTGACATGCCTGCCTTTCTGCAGGACACGCATCATACCCCACA | |
| CATACTGTGAGCATATAGGTGTTGCCCAGCTCGCCTGTGCTGATATCTGCATCAACTTCTG | |
| GTATGGCTTTTGTGTTCCCATCATGAGGGTCATCTCAGATGTGATTCTCATTGCTGTTTCCT | |
| ACGCACACATCCTCTGTGCTGTCTTTGGCCTTCCCTCCCAAGATGCCTGCCAGAAAGCCCT | |
| CGGCACTTGTGGTTCTCATGTCTGTGCATCCTCATGTTTTATACACCTGCCTTTTTCTCCA | |
| TCCTCGCCCATCGCTTTGGACACAATGTCTCTCGCACCTTCCAGATCATGTTTGCCAATCTC | |
| TACATTGTTATCCCACCTGCACTCAACCCCATGGTTTACGGAGTGAAGACCAAGCAGATCA | |
| GAGATAAGGTTATACTTTTGTTTTCTAAGGGTACAGGATGA | |
| AOLFR148 sequences: | |
| MPTVNHSGTSHTVFHLLGIPGLQDQHMWISIPFFISYVTALLGNSLLIFIILTKRSLHEPMYLFLC | (SEQ ID NO: 273) |
| MLAGADIVLSTCTIPQALAIFWFRAGDISLDRCITQLFFIHSTFISESGILLVMAFDHYIAICYPLR | |
| YTTILTNALIKKICVTVSLRSYGTIFPIIFLLKRLTFCQNNIIPHTFCEHIGLAKYACNDIPINIWYG | |
| FSILMSTVVLDVVLIFISYMLILHAVFHMPSPDACHKALNTFGSHVCIIILFYGSGIFTILTQPIGR | |
| HIPPCIHIPLANVCILAPPMLNPIIYGIKTKQIQEQVVQFLFIKQKITLV | |
| ATGCCTACTGTAAACCACAGTGGCACTAGCCACACAGTCTTCCACTTGCTGGGCATCCCTG | (SEQ ID NO: 274) |
| GCCTACAGGACCAGCACATGTGGATTTCTATCCCATTCTTCATTTCCTATGTCACCGCCCTT | |
| CTTGGGAACAGCCTGCTCATCTTCATTATCCTCACAAAGCGCAGCCTCCATGAACCCATGT | |
| ACCTCTTCCTCTGGATGCTGGCTGGAGCAGACATTGTCCTCTCCACGTGCACCATTCCTCAG | |
| GCCTTAGCTATCTTCTGGTTCCGTGCTGGGGACATCTCCCTGGATCGTTGCATCACTCAGCT | |
| CTTCTTCATCCATTCCACCTTCATCTCTGAGTCAGGGATCTTGCTGGTGATGGCCTTTGACC | |
| ACTATATTGCCATATGCTACCCACTGAGGTACACCACCATTCTTACAAATGCTCTGATCAA | |
| GAAAATTTGTGTGACTGTCTCTCTGAGAAGTTATGGTACAATTTTCCCTATCATATTTCTTT | |
| TAAAAAGATTGACTTTCTGCCAGAATAATATTATTCCACACACCTTTTGTGAACACATTGG | |
| CCTAGCCAAATATGCATGTAATGACATTCGAATAAACATTTGGTATGGGTTTTCCATTCTA | |
| ATGTCGACGGTGGTCTTAGATGTTGTACTAATTTTTATTTCCTATATGCTGATTCTCCATGC | |
| TGTCTTCCACATGCCTTCTCCAGATGCTTGCCACAAAGCTCTCAACACATTTGGCTCCCATG | |
| TCTGCATCATCATCCTCTTTTATGGGTCTGGCATCTTCACAATCCTTACCCAGAGGTTTGGA | |
| CGCCACATTCCACCTTGTATCCACATCCCGTTGGCTAATGTCTGCATTCTGGCTCCACCTAT | |
| GCTGAATCCCATTATTTATGGGATCAAAACCAAGCAAATCCAGGAACAGGTGGTTCAGTTT | |
| TTGTTTATAAAACAGAAAATAACTTTGGTTTAA | |
| AOLFR149 sequences: | |
| MSNASLLTAFILMGLPHAPALDAPLFGVFLVVYVLTVLGNLLILLVIRVDSHLHTTMYYFLTNL | (SEQ ID NO: 275) |
| SFIDMWFSTVTVPKLLMTLVFPSGRAISFHSCMAQLYFFHFLGGTECFLYRVMSCDRYLAISYP | |
| LRYTSMMTGRSCTLLATSTWLSGSLHSAVQAILTFHLPYCGPNWIQHYLCDAPPILKLIACADTS | |
| AIETVIFVTVGIVASGCFVLIVLSYVSIVCSILRIRTSEGKHRAFQTCASHCIVVLCFFGPGLFIYLR | |
| PGSRKAVDGVVAVFYTVLTPLLNPVVYTLRNKEVKKALLKLKDKVAHSQSK | |
| ATGTCCAACGCCAGCCTACTGACAGCGTTCATCCTCATGGGCCTTCCCCATGCCCCAGCGC | (SEQ ID NO: 276) |
| TGGACGCCCCCCTCTTTGGAGTCTTCCTGGTGGTTTACGTGCTCACTGTGCTGGGGAACCT | |
| CCTCATCCTGCTGGTGATCAGGGTGGATTCTCACCTCCACACCACCATGTACTACTTCCTCA | |
| CCAACCTGTCGTTCATTGACATGTGGTTCTCCACTGTCACGGTGCCCAAATTGCTGATGAC | |
| TTTGGTGTTCCCAAGTGGCAGGGCTATCTCCTTCCACAGCTGCATGGCTCAGCTCTATTTCT | |
| TTCACTTCCTAGGGGGCACCGAGTGTTTCCTCTACAGGGTCATGTCCTGTGATCGCTACCT | |
| GGCCATCAGTTACCCGCTCAGGTACACCAGCATGATGACTGGGCGCTCGTGTACTCTTCTG | |
| GCCACCAGCACTTGGCTCAGTGGCTCTCTGCACTCTGCTGTCGAGGCCATATTGACTTTCC | |
| ATTTGCCCTACTGTGGACCCAACTGGATCCAGCACTATTTGTGTGATGCACCGCCCATCCT | |
| GAAACTGGCCTGTGCAGACACCTCAGCCATAGAGACTGTCATTTTTGTGACTGTTGGAATA | |
| GTGGCCTCGGGCTGCTTTGTCCTGATAGTGCTGTCCTATGTGTCCATCGTCTGTTCCATCCT | |
| GCGGATCCGCACCTCAGAGGGGAAGCACAGAGCCTTTCAGACCTGTGCCTCCCACTGTATC | |
| GTGGTCCTTTGCTTCTTTGGCCCTGGTCTTTTCATTTACCTGAGGCCAGGCTCCAGGAAAGC | |
| TGTGGATGGAGTTGTGGCCGTTTTCTACACTGTGCTGACGCCCCTTCTCAACCCTGTTGTGT | |
| ACACCCTGAGGAACAAGGAGGTGAAGAAAGCTCTGTTGAAGCTGAAAGACAAAGTAGCAC | |
| ATTCTCAGAGCAAATAG | |
| AOLFR150 sequences: | |
| MELGNVTRVKEFIFLGLTQSQDQSLVLFLFLCLVYMTTLLGNLLIMVTVTCESRLHTPMYFLLR | (SEQ ID NO: 277) |
| NLAILDICFSSTTAPKVLLDLLSKKKTISYTSCMTQIFLFHLLGGADIFSLSVMAFDCYMAISKPL | |
| HYVTIMSRGQCTALISASWMGGFVHSIVQISLLLPLPFCGPNVLDTFYCDVPQVLYKLTCTDTFA | |
| LEFLMISNNGLVTTLWFIFLLVSYTVILMTLRSQAGGGRRKAISTCTSPHHCGDPAFCALHLCLC | |
| PALHCPPHRKGHLCHLHCHLPSAEPFDLHSEEPGNEVSHEKTEEKTRAF | |
| ATGGAGTTGGGAAATGTCACCAGAGTAAAAGAATTTATATTTCTGGGACTTACTCAATCCC | (SEQ ID NO: 278) |
| AAGACCAGAGTTTGGTCTTGTTTCTTTTTTTATGTCTTGTGTACATGACGACTCTGCTGGGA | |
| AACCTCCTCATCATGGTCACCGTGACCTGTGAGTCTCGCCTTCACACCCCCATGTACTTCCT | |
| GCTCCGCAATCTAGCCATCCTTGACATCTGCTTCTCCTCCACAACTGCTCCTAAAGTCTTGC | |
| TGGACCTTCTGTCAAAGAAAAAGACCATATCCTATACAAGCTGCATGACACAGATATTTCT | |
| CTTCCACCTCCTTGGTGGGGCAGACATTTTTTCTCTCTCTGTGATGGCGTTTGACTGCTACA | |
| TGGCCATCTCCAAGCCCCTGCACTATGTGACCATCATGAGTAGAGGGCAATGCACTGCCCT | |
| CATCTCTGCCTCTTGGATGGGGGGCTTTGTCCACTCCATCGTGCAGATCTCCCTGTTGCTGC | |
| CTCTCCCTTTCTGTGGACCCAATGTTCTTGACACTTTCTACTGCGATGTCCCCCAGGTCCTC | |
| AAACTCACTTGCACTGACACTTTTGCTCTTGAGTTCTTGATGATTTCCAACAATGGCCTGGT | |
| CACTACCCTGTGGTTTATCTTCCTGCTTGTGTCCTACACAGTCATCCTAATGACGCTGAGGT | |
| CTCAGGCAGGAGGGGGCAGGAGGAAAGCCATCTCCACTTGCACCTCCCCACATCACTGTG | |
| GTGACCCTGCATTTTGTGCCCTGCATCTATGTCTATGCCCGGCCCTTCACTGCCCTCCCCAC | |
| AGAAAAGGCCATCTCTGTCACCTTCACTGTCATCTCCCCTCTGCTGAACCCTTTGATCTACA | |
| CTCTGAGGAACCAGGAAATGAAGTCAGCCATGAGAAGACTGAAGAGAAGACTCGTGCCTT | |
| CTGA | |
| AOLFR151 sequences: | |
| MFSPNHTIVTEFILLGLTDDPVLEKILFGVFLAIYLITLAGNLCMILLIRTNSHLQTPMYFFLGHLS | (SEQ ID NO: 279) |
| FVDICYSSNVTPNMLHNFLSEQKTISYAGCFTQCLLFIALVITEFYILASMALDRYVAICSPLHYS | |
| SRMSKNICVCLVTIPYMYGFLSGFSQSLLTFHLSFCGSLEINHFYCADPPLIMLACSDTRVKKMA | |
| MFVVAGFNLSSSLFIILLSYLFIFAAIFRIRSAEGRHKAFSTCASHLTIVTLFYGTLFCMYVRPPSE | |
| KSVEESKITAVFYTFLSPMLNPLIYSLRNTDVILAAMQQMIRGKSFHKIAV | |
| ATGTTCTCCCCAAACCACACCATAGTGACAGAATTCATTCTCTTGGGACTGACAGACGACC | (SEQ ID NO: 280) |
| CAGTGCTAGAGAAGATCCTGTTTGGGGTATTCCTTGCGATCTACCTAATCACACTGGCAGG | |
| CAACCTGTGCATGATCCTGCTGATCAGGACCAATTCCGACCTGCAAACACCCATGTATTTC | |
| TTCCTTGGCCACCTCTCCTTTGTAGACATTTGCTATTCTTCCAATGTTACTCCAAATATGCT | |
| GCACAATTTCCTCTCAGAACAGAAGACCATCTCCTACGCTGGATGCTTCACACAGTGTCTT | |
| CTCTTCATCGCCCTGGTGATCACTGAGTTTTACATCCTTGCTTCAATGGCATTGGATCGCTA | |
| TGTAGCCATTTGCAGCCCTTTGCATTACAGTTCCAGGATGTCCAAGAACATCTGTGTCTGT | |
| CTGGTCACTATCCCTTACATGTATGGGTTTCTTAGTGGGTTCTCTCAGTCACTGCTAACCTT | |
| TCACTTATCCTTCTGTGGCTCCCTTGAAATCAATCATTTGTACTGCGCTGATCCTCCTCTTA | |
| TCATGCTGGCCTGCTCTGACACCGGTGTCAAAAAGATGGCAATGTTTGTAGTTGCAGGCTT | |
| TAATCTCTCAAGCTCTCTCTTCATCATTCTTCTGTCCTATCTTTTCATTTTTGCAGCGATCTT | |
| CAGGATCCGTTCTGCTGAAGGCAGGCACAAAGCCTTTTCTACGTGTGCTTCCCACCTGACA | |
| ATAGTCACTTTGTTTTATGGAACCCTCTTCTGCATGTACGTAAGGCCTCCATCAGAGAAGT | |
| CTGTAGAGGAGTCCAAAATAACTGCAGTCTTTTATACTTTTTTGAGCCCAATGCTGAACCC | |
| ATTGATCTATAGCCTACGGAACACAGATGTAATCCTTGCCATGCAACAAATGATTAGGGGA | |
| AAATCCTTTCATAAAATTGCAGTTTAG | |
| AOLFR152 sequences: | |
| MDQINHTNVKEFFFLELTRSRELEFFLFVVFFAVYVATVLGNALIVVTITCESRLHTPMYFLLRN | (SEQ ID NO: 281) |
| KSVLDIVFSSITVPKFLVDLLSDRKTISYNDCMAQIFFFHFAGGADIFFLSVMAYDRYLAIAKYL | |
| HYVTMMRKEVWVALVVASWVSGGLHSIIQVILMLPFPFCGPNTLDAFYCYVLQVVKLACTDT | |
| FALELFMISNNGLVTLLWFLLLLGSYTVILVMLRSHSGEGRNKALSTCTSHMLVVTLHFVPCV | |
| YIYCRPFMTLPMDTTISINNTVITPMLNPIIYSLRNQEMKSAMQRLQRRLGPSESRKWG | |
| ATGGACCAGATCAACCACACTAATGTGAAGGAGTTTTTCTTCCTGGAACTTACACGTTCCC | (SEQ ID NO: 282) |
| GAGAGCTGGAGTTTTTCTTGTTTGTGGTCTTCTTTGCTGTGTATGTAGCAACAGTCCTGGG | |
| AAATGCACTCATTGTGGTCACTATTACCTGTGAGTCCCGCCTACACACTCCTATGTACTTTC | |
| TCCTGCGGAACAAATGACiTCCTGGACATCGTTTTTTCATCTATCACCGTCCCCAAGTTCCTG | |
| GTGGATCTTTTATCAGACAGGAAAACCATCTCCTACAATGACTGCATGGCACAGATCTTTT | |
| TCTTCCACTTTGCTGGTGGGGCAGATATTTTTTTCCTCTCTGTGATGGCCTATGACAGATAC | |
| CTTGCAATGGCCAAGCCCCTGCACTATGTGACCATGATGAGGAAAGAGGTGTGGGTGGCG | |
| TTGGTGGTGGCTTCTTGGGTGAGTGGTGGTTTGCATTCAATCATCCAGGTAATTCTGATGC | |
| TTCCATTCCCCTTCTGTGGCCCCAACACACTGGATGCCTTCTACTGTTATGTGCTCCAGGTG | |
| GTAAAACTGGCCTGCACTGACACCTTTGCTTTGGAGCTTTTCATGATCTCTAACAACGGAC | |
| TGGTGACCCTGCTCTGGTTCCTCCTGCTCCTGGGCTCCTACACTGTCATTCTGGTGATGCTG | |
| AGATCCCACTCTGGGGAGGGGCGGAACAAGGCCCTCTCCACGTGCACGTCCCACATGCTG | |
| GTGGTGACTCTTCACTTCGTGCCTTGTGTTTACATCTACTGCCGGCCCTTCATGACGCTGCC | |
| CATGGACACAACCATATCCATTAATAACACGGTCATTACCCCCATGCTGAACCCCATCATC | |
| TATTCCCTGAGAAATCAAGAGATGAAGTCAGCCATGCAGAGGCTGCAGAGGAGACTTGGG | |
| CCTTCCGAGAGCAGAAAATGGGGGTGA | |
| AOLFR153 sequences: | |
| MSKTSLVTAFILTGLPHAPGLDAPLFGIFLVVYVLTVLGNLLILLVIRVDSHLHTPMYYFLTNLS | (SEQ ID NO: 283) |
| FIDMWFSTVTVPKiMLMTLVSPSGRAISFHSCVAQLYFFHFLGSTECFLYTVMSYDRYLAISYPL | |
| RYTSMMSGSRCALLATSTWLSGSLHSAVQTILTFHLPYCGPNQIQHYLCDAPPILKLACADTSA | |
| NEMVIFVDIGLVASGCFLLIVLSYVSIVCSILRIHTSEGRHRAFQTCASHCIVVLCFFVXCVFIYLR | |
| PGSRDVVDGVVAIFYTVLTPLLNPVVYTLRNKEVKKAVLKIRDKVAHSQGE | |
| ATGTCCAAGACCAGCCTCGTGACAGCGTTCATCCTCACGGGCCTTCCCCATGCCCCAGGGC | (SEQ ID NO: 284) |
| TGGACGCCCCACTCTTTGGAATCTTCCTGGTGGTTTACGTGCTCACTGTGCTGGGGAACCT | |
| CCTCATCCTGCTGGTGATCAGGGTGGATTCTCACCTCCACACCCCCATGTACTACTTCCTCA | |
| CCAACCTGTCCTTCATTGACATGTGGTTCTCCACTGTCACGGTGCCCAAAATGCTGATGAC | |
| CTTGGTGTCCCCAAGCGGCAGGGCTATCTCCTTCCAGAGCTGCGTGGCTCAGCTCTATTTTT | |
| TCCACTTCCTGGGGAGCACCGAGTGTTTCCTCTACACAGTCATGTCCTATGATCGCTACTTG | |
| GCCATCAGTTACCCGCTCAGGTACACCAGCATGATGAGTGGGAGCAGATGTGCCCTCCTGG | |
| CCACCAGCACTTGGCTGAGTGGCTCTCTGCACTCTGCTGTCCAGACCATATTGACTTTCCAT | |
| TTGCCCTACTGTGGACCCAACCAGATCCAGCACTATTTGTGTGATGCACCGCCCATCCTGA | |
| AACTGGCCTGTGCAGACACCTCAGCCAACGAGATGGTCATCTTTGTGGACATTGGGCTAGT | |
| GGCCTCGGGCTGCTTTCTCCTGATAGTGCTGTCTTATGTGTCCATCGTCTGTTCCATCCTGC | |
| GGATCCACACCTCAGAGGGGAGGCACAGAGCCTTTCAGACCTGTGCCTCCGACTGCATCGT | |
| GGTCCTTTGCTTTTTTGTNNCCTGTGTTTTCATTTACCTGAGACCAGGCTCGAGGGACGTCG | |
| TGGATGGAGTTGTGGCCATTTTCTACACTGTGCTGACACCCCTTCTCAACCCTGTTGTGTAC | |
| ACCCTGAGAAACAAGGAGGTGAAGAAAGCTGTGTTGAAACTGAGAGACAAAGTAGCACAT | |
| TCTCAGGGAGAATAA | |
| AOLFR156 sequences: | |
| MCWAMPSPFTGSSTRNMESRNQSTVTEFIFTGFPQLQDGSLLYFFPLLFIYTFIIIDNLLIFSAVRL | (SEQ ID NO: 285) |
| DTHLGNPMYNFISIFSFLEIWYTTATIPKMLSNLISEKKAISMTGCILQMYFFHSLENSEGILLTT | |
| MAIDRYVAICNPLRYQMIMTPRLCAHLSAGSCLFGFLILLPEIVMISTLPFCGPNQIHQIFCDLVP | |
| VLSLACTDTSMILIEDVIHAVTIIITFLIIALSYVRIVTVILRIPSSEGRQKAXSTCAGHLMVFLIFFG | |
| SVSLMYLRFSNTYPPVLDTAIALMFTVLAYFFNPIIYSLRNKDMNNAIKKLFCLQKVLNKPGG | |
| ATGTGCTGGGCTATGCCCTCTCCATTTACAGGTAGCTCTACTAGAAATATGGAGAGCAGAA | (SEQ ID NO: 286) |
| ACCAATCAACAGTGACTGAATTTATCTTCACTGGATTCCCTGAGCTTCAGGATGGTAGTCT | |
| CCTGTACTTCTTTCCTTTACTTTTCATCTATACTTTTATTATCATTGATAACTTATTAATCTT | |
| CTCTGCTGTAAGGCTGGACACCCATCTGGGCAACCCCATGTATAATTTTATCAGTATATTTT | |
| CCTTTCTGGAGATCTGGTACACCACAGCCACCATTCCCAAGATGCTCTCCAACCTCATCAG | |
| TGAAAAGAAGGCCATCTCAATGACTGGCTGCATCTTGCAGATGTATTTCTTCCACTCACTT | |
| GAAAACTCAGAGGGGATCTTGCTGACCACCATGGGCATTGACAGATACGTTGCCATCTGCA | |
| ACCCTCTTCGCTATCAAATGATCATGACCCCCCGGCTCTGTGCTGACCTCTCTGCAGGTTCC | |
| TGCCTCTTCGGTTTCCTTATCCTGCTTCCCGAGATTGTGATGATTTCCACACTGCCTTTCTG | |
| TGGGCCCAACCAAATCCATCAGATCTTCTGTGACTTGGTCCCTGTGCTAAGCCTGGCCTGT | |
| ACAGACACGTGCATGATFCTGATTGAGGATGTGATTCATGCTGTGACCATCATCATTACCT | |
| TCCTAATCATTGCCCTGTCCTATGTAAGAATTGTCACTGTGATATTGAGGATTCCCTCTTCT | |
| GAAGGGAGGCAAAAGGCTNTTTCTACCTGTGCAGGCCACCTCATGGTCTTCCTGATATTCT | |
| TTGGCAGTGTATCACTCATGTACTTGCGTTTCAGCAACACTTATCCACCAGTTTTGGACAC | |
| AGCCATTGCACTGATGTTTACTGTACTTGCTCCATTCTTGAATCCCATCATTTATAGCCTGA | |
| GAAACAAGGACATGAACAATGCAATTAAAAAACTGTTCTGTCTTCAAAAAGTGTTGAACA | |
| AGCCTGGAGGTTAA | |
| AOLFR157 sequences: | |
| MAMDNVTAVFQFLLIGISNYPQWRDTFFTLVLIIYLSTLLGNGFMIFLIHFDPNLHTPIYFFLSNL | (SEQ ID NO: 287) |
| SFLDLCYGTASMPQALVHCFSTHPYLSYPRCLAQTSVSLALATAECLLLAAMAYDRVVAISNP | |
| LRYSVVMNGPVCVCLVATSWGTSLVLTAMLILSLRLHFCGANVINHFACEILSLIKLTCSDTSL | |
| NEFMILITSIFTLLLPFGFVLLSYIRIAMAIIRIRSLQGRLKAFTTCGSHLTVVTIFYGSAISMYMKT | |
| QSKSSPDQDKFISVFYGALTPMLNPLIYSLRKKDVKRAIRKVMLKRT | |
| ATGGCCATGGACAATGTCACAGCAGTGTTTCAGTTTCTCCTTATTGGCATTTCTAACTATCC | (SEQ ID NO: 288) |
| TCAATGGAGAGACACGTTTTTCACATTAGTGCTGATAATTTACCTCAGCACATTGTTGGGG | |
| AATGGATTTATGATCTTTCTTATTCACTTTGACCCCAACCTCGACACTCCAATCTACTTCTT | |
| CCTTAGTAACCTGTCTTTCTTAGAGCTTTGTTATGGAACAGCTTCCATGCCCCAGGCTTTGG | |
| TGCATTGTTTCTCTACCCATCCCTACCTCTCTTATCCCCGATGTTTGGCTCAAACGAGTGTC | |
| TCCTTGGCTTTGGCCACAGCAGAGTGCCTCCTACTGGCTGCCATGGCCTATGACCGTGTGG | |
| TTGCTATCAGCAATCCCCTGCGTTATTCAGTGGTTATGAATGGCCCAGTGTGTGTCTGCTT | |
| GGTTGCTACCTCATGGGGGACATCACTTGTGCTCACTGCCATGCTCATCCTATCCCTGAGG | |
| CTTCACTTCTGTGGGGCTAATGTCATCAACCATTTTGCCTGTGAGATTCTCTCCCTCATTAA | |
| GGTGACCTGTTCTGATACCAGCCTCAATGAATTTATGATCCTCATCACCAGTATCTTCACCC | |
| TGCTGCTACCATTTGGGTTTGTTCTCCTCTCCTACATACGATTGCTATGGCTATCATAAGG | |
| ATTCGCTCACTCCAGGGCAGGCTCAAGGCCTTTACCACATGTGGCTCTCACCTGACCGTGG | |
| TGACAATCTTCTATGGGTCAGCCATCTCCATGTATATGAAAACTCAGTCCAAGTCCTCCCC | |
| TGACCAGGACAAGTTTATCTCAGTGTTTTATGGAGCTTTGACACCCATGTTGAACCCCCTG | |
| ATATATAGCCTGAGAAAAAAAGATGTTAAACGGGCAATAAGGAAAGTTATGTTGAAAAGG | |
| ACATGA | |
| AOLFR158 sequences: | |
| MKAGNFSDTPEFFLLGLSGDPELQPILFMLFLSMYLATMLGNLLIILAVNSDSHLHTPMYFLLSI | (SEQ ID NO: 289) |
| LSLVDICFTSTTMPKMLVNIQAQAQSINYTGCLTQICFVLVFVGLENGILVMMAYDRFVAIMCHP | |
| LRYNVIMNPKLCGLLLLLSFIVSVLDALLHTLMVLQLTFCIDLEIPHFFCELAHILKLACSDVLIN | |
| NILVYLVTSLLGVVPLSGIIFSYTRIVSSVMKIPSAGGKYKAFSICGSHLIVVSLFYGTGFGVYLSS | |
| GATHSSRKGAIASVMYTVVTPMLNPLIYSLRNKDMLKALRKLISRIPSFH | |
| ATGAAAGCAGGAAACTTCTCAGACACTCCAGAATTCTTTCTCTTGGGATTGTCAGGGGATC | (SEQ ID NO: 290) |
| CGGAGCTGCAGCCCATCCTCTTCATGCTGTTCCTGTCCATGTACCTGGCCACAATGCTGGG | |
| GAACCTGCTCATCATCCTGGCCGTCAACTCTGACTCCCACCTCCACACCCCCATGTACTTCC | |
| TCCTCTCTATCCTGTCCTfGGTCGACATCTGTTTCAGCTCCACCACGATGCCCAAGATGGTG | |
| GTGAACATCCAGGCACAGGCTCAATCCATCAATTACACAGGCTGCCTCACCCAAATCTGCT | |
| TTGTCCTGGTTTTTGTTGGATTGGAAAATGGAATTCTGGTCATGATGGCCTATGATCGATT | |
| TGTGGCCATCTGTCACCCAGTGAGGTACAATGTCATCATGAACCCCAAACTCTGTGGGCTG | |
| CTGCTTCTGCTGTCCTTCATCGTTAGTGTCCTGGATGCTCTGCTGCACACGTTGATGGTGCT | |
| ACAGCTGACCTTCTGCATAGACCTGGAAATTCCCGACTTTTTCTGTGAACTAGCTCATATTC | |
| TCAAGCTCGCCTGTTCTGATGTCCTCATCAATAACATCCTGGTGTATTTGGTGACCAGCCT | |
| GTTAGGTGTTGTTCCTCTCTCTGGGATCATTTTCTCTTACACACGAATTGTCTCCTCTGTCA | |
| TGAAAATTCCATCAGCTGGTGGAAAGTATAAAGCTTTTTCCATCTGCGGGTCACATTTAAT | |
| CGTTGTTTCCTTGTTTTATGGAACAGGGTTTGGGGTGTACCTTAGTTCTGGGGCTACCCACT | |
| CCTCCAGGAAGGGTGCAATAGCATCAGTGATGTATACCGTGGTCACCCCCATGCTGAACCC | |
| ACTCATTTACAGCCTGAGAAACAAGGACATGTTGAAGGCTTTGAGGAAACTAATATCTAG | |
| GATACCATCTTTCCATTGA | |
| AOLFR159 sequences: | |
| MGPRNQTAVSEFLLMKVTEDPELKIIPFSLFLSMYLVTILGNLLILLAVISDSHLHTPMYFLLFN | (SEQ ID NO: 291) |
| LSFTDICLTTTTVPKILVNIQAQNQSITYTGCLTQICLVLVFAGLESCFLAVMAYDRYVAICHPL | |
| RYTVLMNVHFWGLLILLSMFMSTMDALVQSLMVLQLSFCKNVEIPLFFCEVVQVIKLACSDTL | |
| INNILIYFASSVFGAIPLSGIIFSYSQIVTSVLRMPSARGKYKAFSTCGCHLSVFSLFYGTAFGVYIS | |
| SAVAESSRITAVASVMYTVVPQMMNPFIYSLRNKEMKKALRKLIGRLFPF | |
| ATGGGACCCAGAAACCAAACAGCTGTTTCAGAATTTCTTCTCATGAAAGTGACAGAGGAC | (SEQ ID NO: 292) |
| CCAGAACTGAAGTTAATCCCTTTCAGCCTGTTCCTGTCCATGTACCTGGTCACCATCCTGG | |
| GGAACCTGCTCATTCTCCTGGCTGTCATCTCTGACTCCCACCTCCACACCCCCATGTACTTC | |
| CTTCTCTTTAATCTCTCCTTTACTGACATCTGTTTAACCACAACCACAGTCCCAAAGATCCT | |
| AGTGAACATCCAAGCTCAGAATCAGAGTATCACTTACACAGGCTGCCTCACCCAGATCTGT | |
| CTTGTCTTGGTTTTTGCTGGCTTGGAAAGTTGCTTTCTTGCAGTCATGGCCTACGACCGCTA | |
| TGTGGCCATTTGCCACCCACTGAGGTACACAGTCCTCATGAATGTCCATTTCTGGGGCTTG | |
| CTGATTCTTCTCTCCATGTTCATGAGCACTATGGATGCCCTGGTTCAGAGTCTGATGGTATT | |
| GCAGCTGTCCTTCTGCAAAAACGTTGAAATCCCTTTGTTCTTCTGTGAAGTCGTTCAGGTC | |
| ATCAAGCTCGCCTGTTCTGACACCCTCATCAACAACATCCTCATATATTTTGCAAGTAGTGT | |
| ATTTGGTGCAATTCCTCTCTCTGGAATAATTTTCTCTTATTCTCAAATAGTCACCTCTGTTC | |
| TGAGAATGCCATCAGCAAGAGGAAAGTATAAAGCGTTTTCCACCTGTGGCTGTCACCTCTC | |
| TGTTTTTTCCTTGTTCTATGGGACAGCTTTTGGGGTGTACATTAGTTCTGCTGTTGCTGAGT | |
| CTTCCCGAATTACTGCTGTGGCTTCAGTGATGTACACTGTGGTCCCTCAAATGATGAACCC | |
| CTTCATCTACAGCCTGAGAAATAAGGAGATGAAGAAAGCTTTGAGGAAACTTATTGGTAG | |
| GCTGTTTCCTTTTTAG | |
| AOLFR160 sequences: | |
| MPMQLLLTDFIIFSIRFIINSMEARNQTAISKFLLLGLIEDPELQPVLFSLFLSMYLVTILGNLLILL | (SEQ ID NO: 293) |
| AVISDSHLHTPMYFFLSNLSFLDICLSTTTIPKMLVNIQAQNRSITYSGCLTQICFVLFFAGLENC | |
| LLAAMAYDRYVAICHPLRYTVIMNPRLCGLLILLSLLTSVVNALLLSLMVLRLSFCTDLEIPLFF | |
| CELAQVIQLTCSDTLINNILIYFAACIFGGVPLSGIILSYTQITSCVLRMPSASGKRKAVSTCGSHL | |
| SIVLLFYGAGLGVYISSVVTDSPRKTAVASVMYSVFPQMVNPFIYSLRNKDMKGTLRKFIGRIP | |
| SLLWCAICFGFRFLE | |
| ATGCCGATGCAGCTGCTGCTTACAGATTTTATTATCTTTTCCATCAGATTCATCATCAACAG | (SEQ ID NO: 294) |
| CATGGAAGCGAGAAACCAAACAGCTATTTCAAAATTCCTTCTCCTGGGACTGATAGAGGAT | |
| CCGGAACTGCAGCCCGTCCTTTTCAGCCTGTTCCTGTCCATGTACTTGGTCACCATCCTGGG | |
| GAACCTGCTCATCCTCTTGGCTGTCATCTCTGACTCTCACCTCCACACCCCCATGTACTTCT | |
| TCCTCTCCAATCTCTCCTTTTTGGACATTTGTTTAAGCACAACCACGATCCCAAAGATGCTG | |
| GTGAACATCCAAGCTCAGAATCGGAGCATCACGTACTCAGGCTGCCTCACCCAGATCTGCT | |
| TTGTCTTGTTTTTTGCTGGCTTGGAAAATTGTCTCCTTGCAGCAATGGCCTATGACCGCTAT | |
| GTGGCCATTTGTCACCCCCTTAGATACACAGTCATCATGAACCCCCGCCTCTGTGGCCTGC | |
| TGATTCTTCTCTCTCTGTTGACTAGTGTTGTGAATGCCCTTCTTCTCAGCCTGATGGTGTTG | |
| AGGCTGTCCTTCTGCACAGACCTGGAAATCCCGCTCTTCTTCTGTGAACTGGCTCAGGTCA | |
| TCCAACTCACCTGTTCAGACACCCTCATCAATAACATCCTGATATATTTTGCAGCTTGCATA | |
| TTTGGTGGTGTTCCTCTGTCTGGAATCATTTTGTCTTACACTCAGATCACCTCCTGTGTTTT | |
| GAGAATGCCATCAGCAAGTGGAAAGCACAAAGCAGTTTCCACCTGTGGGTCTCACCTCTCC | |
| ATTGTTCTCTTGTTCTATGGGGCAGGTTTGGGGGTGTACATTAGTTCTGTGGTTACTGACTC | |
| ACCTAGGAAGACTGCAGTGGCTTCAGTGATGTATTCTGTGTTCCCTCAAATGGTGAACCCC | |
| TTTATCTATAGTCTGAGGAATAAGGACATGAAAGGAACCTTGAGGAAGTTCATAGGGAGG | |
| ATACCTTCTCTTCTGTGGTGTGCCATTTGCTTTGGATTCAGGTTTCTAGAGTAA | |
| AOLFR161 sequences: | |
| MEPRNQTSASQFILLGLSEKPEQETLLFSLFFCMYLVMVVGNLLIILAISIDSHLHTPMYFFLANL | (SEQ ID NO: 295) |
| SLVDFCLATNTIPKMLVSLQTGSKAISYPCCLIQMYFFHFFGIVDSVIIAMMAYDRFVAICHPLH | |
| YAKIMSLRLCRLLVGALWAFSCFISLTHILLMARLVFCGSHEVPHYFCDLTPILRILSCTDTSVNR | |
| IFILIVAGMVIATPFVCILASYARILVAIMKVPSAGGRKKAFSTCSSHLSVVALFYGTTIGVYLCP | |
| SSVLTTVKEKASAVMYTAVTPMLNPFIYSLRNRDLKGALRKLVNRKITSSS | |
| ATGGAACCAAGAAACCAAACCAGTGCATCTCAATTCATCCTCCTGGGACTCTCAGAAAAGC | (SEQ ID NO: 296) |
| CAGAGCAGGAGACGCTTCTCTTTTCCCTGTTCTTCTGCATGTACCTGGTCATGGTCGTGGG | |
| GAACCTGCTCATCATCCTGGCCATCAGCATAGACTCCCACCTCCACACCCCCATGTACTTCT | |
| TCCTGGCCAACCTGTCCCTGGTTGATTTCTGTCTGGCCACCAACACCATCCCTAAGATGCT | |
| GGTGAGCCTTCAAACCGGGAGCAAGGCCATCTCTTATCCCTGCTGCCTGATCCAGATGTAC | |
| TTCTTCCATTTCTTTGGCATCGTGGACAGCGTCATAATCGCCATGATGGCTTATGACCGGTT | |
| CGTGGCCATCTGCCACCCATTGCACTACGCCAAGATCATGAGCGTACGCCTCTGTCGCCTG | |
| CTGGTCGGCGCCCTCTGGGCGTTTTCCTGCTTCATCTCACTCACTCACATCCTCCTGATGGC | |
| CCGTCTCGTTTTCTGCGGCAGCCATGAGGTGCCTCACTACTTCTGCGACCTCACTCCCATCC | |
| TCCGACTTTCGTGCACGGACACCTCTGTGAATAGGATCTTCATCCTCATTGTGGCAGGGAT | |
| GGTGATAGCCACGCCCTTTGTCTGCATCCTGGCCTCCTATGCTCGCATCCTTGTGGCCATCA | |
| TGAAGGTCCCCTCTGCAGGCGGCAGGAAGAAAGCCTTCTCCACCTGCAGCTCCCACCTGTC | |
| TGTGGTTGCTCTCTTCTATGGGACCACCATTGGCGTCTATCTGTGTCCCTCCTCGGTCCTCA | |
| CCACTGTGAAGGAGAAAGCTTCTGCGGTGATGTACACAGCAGTCACCCCCATGCTGAATCC | |
| CTTCATCTACAGCTTGAGGAACAGAGACCTGAAGGGGCTCTCAGGAAGCTGGTCAAACAG | |
| AAAGATCACCTCATCTTCCTGA | |
| AOLFR162 sequences: | |
| MMRLMKEVRGRNQTEVTEFLLLGLSDNPDLQGVLFALFLLIYMANMVGNLGMIVLIKIDLCLH | (SEQ ID NO: 297) |
| TPMYFFLSSLSFVDASYSSSVTPKAMLVNLMAENKAISFHGCAAQFYFFGSFLGTECFLLAMMA | |
| YDRYAAIWNIILYPVLVSGRICFLLIATSFLAGCGNAAIHTGMTFRISFCGSNPINHFYCDTPPL | |
| LKLSCSDTHFNGIVIMAFSSFIVISCVMIVLISYLCIFIAVLKMPSLEGRHKAFSTCASYLMAVTIF | |
| FGTILFMYLRPTSSYSMEQDKVVSVFYTVIIPVLNPLIYSLKNKDVKKALKKILWKHIL | |
| ATGATGAGACTTATGAAAGAGGTTCGAGGCAGAAATCAAACAGAAGTAACAGAATTTCTC | (SEQ ID NO: 298) |
| CTCTTAGGACTTTCCGACAATCCAGATCTACAAGGAGTCCTCTTTGCATTGTTTCTGTTGAT | |
| CTATATGGCAAACATGGTGGGCAATTTGGGGATGATTGTATTGATTAAGATTGATCTCTGT | |
| CTCCACAGCCCCATGTATTTCTTTCTCAGTAGCCTCTCTTTTGTAGATGCCTCTTACTCTTCT | |
| TCCGTCACTCCCAAGATGCTGGTGAAGCTCATGGCTGAGAATAAGGCCATTTCTTTTCATG | |
| GATGTGCTGCCCAGTTCTACTTCTTTGGCTCCTTCCTGGGGACTGAGTGCTTCCTGTTGGCC | |
| ATGATGGCATATGACCGCTATGCAGCCATTTGGAACCCCCTGCTCTACCGAGTTCTCGTGT | |
| CTGGGAGAATTTGCTTTTTGCTAATAGCTACCTCCTTCTTAGCAGGTTGTGGAAATGCAGC | |
| CATACATACAGGGATGACTTTTAGGTTGTCCTTTTGTGGTTCTAATAGGATCAACCATTCT | |
| ACTGTGACACCCCGCCACTGCTCAACTCTCTTGCTCTGATACCCACTTCAATGGCATTGTG | |
| ATCATGGCATTCTCAAGTTTTATTGTCATCAGCTGTGTTATGATTGTCCTCATTTCCTACCT | |
| GTGTATCTTCATTGCCGTCTTGAAGATGCCTTCGTTAGAGGGCAGGCACAAAGCCTTCTCC | |
| ACCTGTGCCTCTTACCTCATGGCTGTCACCATATTCTTTGGAACAATCCTCTTCATGTACTT | |
| GCGCCCTACATCTAGCTACTCAATGGAGCAAGACAAGGTTGTCTCTGTCTTTTATACAGTA | |
| ATAATCCCTGTGCTAAATCCCCTCATCTATAGTTTAAAAAATAAGGATGTAAAAAAGGCCC | |
| TAAAGAAGATCTTATGGAAACACATCTTGTAG | |
| AOLFR163 sequences: | |
| MQRSNHTVTEFILLGFTTDPGMQLGLFVVFLGVYSLTVVGNSTLIVLICNDSGLHTPMYFFTGN | (SEQ ID NO: 299) |
| LSFLDLWYSSVYTPKILVTCISEDKSISFAGCLCQFFFSAGLAYSECYLLAAVAYDRYVAISKPL | |
| LYAQAMSIKLCALLVAVSYCGGFINSSIITKKTFSFNFCRENIIDDFFCDLLPLVELACGEKGGYK | |
| IMMYFLLASNVICPAVLILASYLFIITSVLRISSSKGYLKAFSTCSSHLTSVTLYYGSILYIYALPRS | |
| SYSFDMDKIVSTFYTVVFPMLNLMIYSLRNKDVKEALKKLLP | |
| ATGCAGAGGAGCAATCATACAGTGACTGAGTTTATACTGCTGGGCTTCACCACAGACCCA | (SEQ ID NO: 300) |
| GGAATGCAGCTGGGCCTCTTCGTGGTGTTCCTGGGCGTGTACTCTCTCACTGTGGTAGGAA | |
| ATAGCACCCTCATCGTGTTGATCTGTAATGACTCCTGCCTCCACAGACCCATGTATTTTTTC | |
| ACTGGAAATCTGTCGTTTCTGGATCTCTGGTATTCTTCTGTCTACACCCCAAAGATCCTAGT | |
| GACCTGCATCTCTGAAGACAAAAGCATCTCCTTTGCTGGCTGCCTGTGTCAGTTCTTCTTCT | |
| CTGCAGGGCTGGCCTATAGTGAGTGCTACCTGCTGGCTGCGGTGGCTTATGACCGCTACGT | |
| GGCCATCTCCAAGCCCCTGCTTTATGCCCAGGCCATGTCGATAAAGCTGTGTGCATTGCTG | |
| GTAGCAGTCTCATATTGTGGTGGCTTTATTAACTCTTCAATCATCACCAAGAAAACGTTTTC | |
| CTTTAACTTCTGCCGTGAAAACATGATTGATGACTTTTTCTGTGATTTGCTTCCCTTGGTGG | |
| AGCTGGCCTGTGGCGAGAAGGGCGGCTATAAAATTATGATGTACTTCCTGCTGGCCTCCAA | |
| TGTCATCTGCCCCGCAGTGCTCATCCTGGCCTCCTACCTCTTTATCATCACCAGTGTCTTGA | |
| GGATCTCCTCCTCCAAGGGCTACCTCAAAGCCTTCTCCACATGCTCCTCCCACCTGACCTCT | |
| GTCACTTTATACTATGGCTCCATTCTCTACATCTACGCTCTCCCCAGATCTAGCTATTCTTT | |
| TGATATGGACAAAATAGTTTCTACATTTTACACTGTGGTATTCCCCATGTTGAATCTCATG | |
| ATCTACAGCCTAAGGAATAAGGATGTGAAAGAGGCTCTGAAAAAACTTCTCCCATAA | |
| AOLFR164 sequences: | |
| MFLTERNTTSEATFTLLGFSDYLELQIPLFFVFLAVYGFSVVGNLGMIVIIKINNPKLHTPMYFFLN | (SEQ ID NO: 301) |
| HLSFVDFGYSSIIAPMMLVNLVVEDRTISFSGCLVQFFFFCTFVVTELILFAVMAYDHFVAICNP | |
| LLYTVAISQKLCAMLVVVLYAWGVACSLTLACSALKISFHGFNT1NHFFCELSSLISLSYPDSYL | |
| SQLLLFTVATFNEISTLLIILTSYAFIIVTTLKMPSASGHRKVFSTCASHLTAITIFHGTILFLYCVP | |
| NSKNSRHTVKVASVFYTVVIPLLNPLIYSLRNKDVKDAIRKIINTKYFHIKHRHWYPFNFVIEQ | |
| ATGTTTCTGACAGAGAGAAATACGACATCTGAGGCCACATTCACTCTCTTGGGCTTCTCAG | (SEQ ID NO: 302) |
| ATTACCTGGAACTGCAAATTCCCCTCTTCTTTGTATTTCTGGCAGTCTACGGCTTCAGTGTG | |
| GTAGGGAATCTTGGGATGATAGTGATCATCAAAATTAACCCAAAATTGCATACCCCCATGT | |
| ATTTTTTCCTCAACCACCTCTCCTTTGTGGATTTCTGCTATTCCTCCATCATTGCTCCCATGA | |
| TGCTGGTGAACCTGGTTGTAGAAGATAGAACCATTTCATTCTCAGGATGTTTGGTGCAATT | |
| CTTTTTCTTTTGCACCTTTGTAGTGACTGAATTAATTCTATTTGCGGTGATGGCCTATGACC | |
| ACTTTGTGGCCATTTGCAATCCTCTGCTCTACACAGTTGCCATCTCCCAGAAACTCTGTGCC | |
| ATGCTGGTGGTTGTATTGTATGCATGGGGAGTCGCATGTTCCCTGACACTCGCGTGCTCTG | |
| CTTTAAAGTTATCTTTTCATGGTTTCAACACAATCAATCATTTCTTCTGTGAGTTATCCTCC | |
| CTGATATCACTCTCTTTACCCTGACTCTTATCTCAGCCAGTTGCTTCTTTTCACTGTTGCCAG | |
| TTTTAATGAGATAAGCACACTACTCATCATTCTGACATCTTATGCATTCATCATTGTCACCA | |
| CCTTGAAGATGCCTTCAGCCAGTGGGCACCGCAAAGTCTTCTCCACCTGTGCCTCCCACCT | |
| GACTGCCATCACCATCTTCCATGGCACCATCCTCTTCCTCTACTGTGTACCCAACTCCAAAA | |
| ACTCCAGGCACACAGTCAAAGTGGCCTCTGTGTTTTACACCGTGGTGATCCCCTTGTTGAA | |
| TCCCCTGATCTACAGTCTGAGAAATAAAGATGTTAAGGATGCAATCCGAAAAATAATCAAT | |
| ACAAAATATTTTCATATTAAACATAGGCATTGGTATCCATTTAATTTTGTTATTGAACAATA | |
| A | |
| AOLFR165 sequences: | |
| MAVGRNNTIVTKFILLGLSDHPQMKIFLFMLFLGLYLLTLAWNLSLIALIKMDSHLHMPMYFFL | (SEQ ID NO: 303) |
| SNLSFLDICYVSSTAPKMLSDIITEQKTISFVGCATQYFVFCGMGLTECFLLAAMAYDRYAAICN | |
| PLLYTVLISHTLCLKMVVGAYVGGFLSSFIETYSVYQHDFCGPYMINHFFCDLPPVLALSCSDTF | |
| TSEVVTFIVSVVVGIVSVLVVLISYGYIVAAVVKISSATGRTKAYSTCASHLTAVTLFYGSGFFM | |
| YMRPSSSYSLNRDKVVSIFYALVIPVVNPIIYSFRNKEIKNAMRKAMERDPGISHGGPFIFMTLG | |
| ATGGCTGTAGGAAGGAACAACACAATTGTGACAAAATTCATTCTCCTGGGACTTTCAGACC | (SEQ ID NO: 304) |
| ATCCTCAAATGAAGATTTTCCTTTTCATGTTATTTCTGGGGCTCTACCTCCTGACGTTGGCC | |
| TGGAACTTAAGCCTCATTGGCCTCATTAAGATGGACTCTCACCTGCACATGCCCATGTACT | |
| TCTTCCTCAGTAACCTGTCCTTCCTGGACATCTGCTATGTGTCCTCCACCGCCCCTAAGATG | |
| CTGTCTGACATCATCACAGAGCAGAAAACCATTTCCTTTGTTGGCTGTGCCACTCAGTACT | |
| TTGTCTTCTGTGGGATGGGGCTGACTGAATGCTTTCTCCTGGCAGCTATGGCCTATGACCG | |
| GTATGCTGCAATCTGCAACCCCTTGCTTTACACAGTCCTCATATCCCATACACTTTGTTTAA | |
| AGATGGTGGTTGGCGCCTATGTGGGTGGATTCCTTAGTTCTTTCATTGAAACATACTCTGT | |
| CTATGAGCATGATTTCTGTGGGCCCTATATGATCAACCACTTTTTCTGTGACCTCCCTCCAG | |
| TCCTGGCTCTGTCCTGCTCTGATACCTTCACCAGCGAGGTGGTGACCTTCATAGTCAGTGTT | |
| GTCGTTGGAATAGTGTCTGTGCTAGTGGTCCTCATCTCTTATGGTTACATTGTTGCTGCTGT | |
| TGTGAAGATCAGCTCAGCTACAGGTAGGACAAAGGCCTTCAGCACTTGTGCCTCTCACCTG | |
| ACTGCTGTGACCCTCTTCTATGGTTCTGGATTCTTCATGTACATGCGACCCAGTTCCAGCTA | |
| CTCCCTAAACAGGGACAAGGTGGTGTCCATATTCTATGCCTTGGTGATCCCCGTGGTGAAT | |
| CCCATCATCTACAGTTTTAGGAATAAGGAGATTAAAAATGCCATGAGGAAAAGCCATGGAA | |
| AGGGACCCCGGGATTTCTGACGGTGGACCATTCATTTTTATGACCTTGGGCTAA | |
| AOLFR166 sequences: | |
| MEMENCTRVKEFIFLGLTQNREVSLVLFLFLLLVYVTTLLGNLLIMVTVTCESRLHTPMYFLLH | (SEQ ID NO: 305) |
| NLSIADLCFSSITVPKVLVDLLSERKTISFNHCFTQMFLFHLIGGVVFSLSVMALDRYVAISKPL | |
| HYATIMSRDHCIGLTVAAWLGGFVHSIVQISLLLPLPFCGPNVLDTFYCDVHRVLKLAHTDIFIL | |
| ELLMISNNGLLTTLWFFLLLVSYIVILSLPKSQAGEGRRKAISTCTSHITVVTLHFVPCIYVYARP | |
| FTALPMDKAISVTFTVISPLLNPLIYTLRNHEMKSAMRRLKRRLVPSDRK | |
| ATGGAGATGGAAAACTGCACCAGGGTAAAAGAATTTATTTTCCTTGGCCTGACCCAGAATC | SEQ ID NO: 306) |
| GGGAAGTGAGCTTAGTCTTATTTCTTTTCGTACTCTTGGTGTATGTGACAACTTTGCTGGGA | |
| AACCTCCTCATCATGGTCACTGTTACCTGTGAATCTCGCCTTCACACGCCCATGTATTTTTT | |
| GCTCCATAATTTATCTATTGCCGATATCTGCTTCTCTTCCATCACAGTGCCCAAGGTTCTGG | |
| TGGACCTTCTGTCTGAAAGAAAGACGATCTCGTTCAATCATTGCTTCACTCAGATGTTTCTA | |
| TTCCACCTTATTGGAGGGGTGGATGTATTTTCTCTTTCGGTGATGGCATTGGATCGATATG | |
| TGGCCATCTGCAAGCCCCTGCACTATGCGACTATCATGAGTAGAGACCATTGCATTGGGCT | |
| CACAGTGGCTGCCTGGTTGGGGGGCTTTGTCCACTCCATCGTGCAGATTTCCCTGTTGCTC | |
| CCACTCCCTTTCTGCGGACCCAATGTTCTTGACACTTTCTACTGTGATGTCCACCGGGTGCT | |
| CAAACTGGGCCATACAGACATTTTCATACTTGAACTACTAATGATTTCCAACAATGGACTG | |
| CTCACCACACTGTGGTTTTTCCTGCTCCTGGTGTCCTACATAGTCATATTATCATTACCCAA | |
| GTCTCAGGCAGGAGAGGGCAGGAGGAAAGCCATCTCCACCTGCACCTCCCAGATCACTGT | |
| GGTGACCCTGCATTTCGTGCCCTGCATCTATGTCTATGCCCGGCCCTTCACTGCCCTCCCCA | |
| TGGATAAGGCCATCTCTGTCACCTTCACTGTCATCTCGCCTCTGCTCAACCCCTGATCTAC | |
| ACTCTGAGGAACCATGAGATGAAGTCAGCCATGAGGAGACTGAAGAGAAGACTTGTGCCT | |
| TCTGATAGAAAATAG * | |
| AOLFR167 sequences: | |
| MSITKAWNSSSVTMFILLGFTDHPELQALLFVTFLGIYLTTLAWNLALIFLIRGDTHLHTPMYFF | (SEQ ID NO: 307) |
| LSNLSFIDICYSSAVAPNMLTDFFWEQKTISFVGGAAQFFFFVGMGLSECLLLTAMAYDRYAAI | |
| SSPLLYPTIMTQGLCTRMVVGAYVGGFLSSLIQASSIFRLHFCGPNINHFFCDLPPVLALSCSDT | |
| FLSQVVNFLVVVTVGGTSFLQLLISYGYIVSAVLKIPSAEGRWKACNTCASHLMVVTLLFGTAL | |
| FVYLRPSSSYLLGRDKVVSVFYSLVIPMLNPLIYSLRNKEIKDALWKVLERKKVFS | |
| ATGTCCATAACGAAAGCCTGGAACAGCTCATCAGTGACCATGTTCATCCTCCTGGGATTCA | (SEQ ID NO: 308) |
| CAGACCATCCAGAACTCCAGGCCCTCCTCTTTGTGACCTTCCTGGGCATCTATCTTACCACC | |
| CTGGCCTGGAACCTGGCCCTCATTTTTCTGATCAGAGGTGACACCCATCTGCACACACCCA | |
| TGTACTTCTTCCTAAGCAACTTATCTTTCATTGACATCTGCTACTCTTGTGCTGTGGCTCCC | |
| AATATGCTCACTGACTTCTTCTGGGAGCAGAAGACCATATCATTTGTGGGCTGTGCTGCTC | |
| AGTTTTTTTTCTTTGTCGGCATGGGTCTGTCTGAGTGCCTCCTCCTGACTGCTATGGCATAC | |
| GACCGATATGCAGCCATCTCCAGCCCCCTTCTCTACCCCACTATCATGACCCAGGGCCTCT | |
| GTACACGCATGGTGGTTGGGGCATATGTTGGTGGCTTCCTGAGCTCCCTGATCCAGGCCAG | |
| CTCCATATTTAGGCTTCACTTTTGCGGACCCAACATCATCAACCACTTCTTCTGCGACCTCC | |
| CACCAGTCCTGGCTCTGTCTTGCTCTGACACCTTCCTGAGTCAAGTGGTGAATTTCCTCGTG | |
| GTGGTCACTGTCGGAGGAACATCGTTCCTCCAACTCCTTATCTCCTATGGTTACATAGTGT | |
| CTGCGGTCCTGAAGATCCCTTCAGCAGAGGGCCGATGGAAAGCCTGCAACACGTGTGCCT | |
| CGCATCTGATGGTGGTGACTCTGCTGTTTGGGACAGCCCTTTTCGTGTACTTGCGACCCAG | |
| CTCCAGCTACTTGCTAGGCAGGGACAAGGTGGTGTCTGTTTTCTATTCATTGGTGATCCCC | |
| ATGCTGAACCCTCTCATTTACAGTTTGAGGAACAAAGAGATCAAGGATGCCCTGTGGAAG | |
| GTGTTGGAAAGGAAGAAAGTGTTTTCTTAG | |
| AOLFR168 sequences: | |
| MEKINNVTEFIFWGLSQSPEIEKVCFVVFSFFYIIILLGNLLIMLTVCLSNLFKSPMYFFLSFLSFV | (SEQ ID NO: 309) |
| DICYSSVTAPKMIVDLLAKDKTISYVGCMLQLLGVHFFGCTEIFILTVMAYDRYVAICKPLHYM | |
| TIMNRETCNKMLLGTWVGGFLHSIIQVALVVQLPFCGPNEIDHYFCDVHPVLKLACTETYIVG | |
| VVVTANSGTIALGSFVILLISYSIILVSLRKQSAEGRRKALSTCGSHIAMVVIFFGPCTFMYMPSD | |
| TTFSEDKMVAVFYTIITPMLNPLIYTLRNAEVKNAMKKLWGRNVFLEAKGK | |
| ATGGAAAAAATAAACAACGTAACTGAATTCATTTTCTGGGGTCTTTCTCAGAGCCCAGAGA | (SEQ ID NO: 310) |
| TTGAGAAAGTTTGTTTTGTGGTGTTTTCTTTCTTCTACATAATCATTCTTCTGGGAAATCTC | |
| CTCATCATGCTGACAGTTTGCCTGAGCAACCTGTTTAAGTCACCCATGTATTTCTTTCTCAG | |
| CTTCTTGTCTTTTGTGGACATTTGTTACTCTTCAGTCACAGCTCCCAAGATGATTGTTGACC | |
| TGTTAGCAAAGGACAAAACCATCTCCT1ATGTGGGGTGCATGTTGCAACTGCTTGGAGTAC | |
| ATTTCTTTGGTTGCACTGAGATCTTCATCCTTACTGTAATGGCCTATGATCGTTATGTGGCT | |
| ATCTGTAAACCCCTACATTATATGACCATCATGAACCGGGAGACATGCAATAAAATGTTAT | |
| TAGGGACGTGGGTAGGTGGGTTGTTACACTCCATTATCCAAGTGGCTCTGGTAGTCCAACT | |
| ACCCTTTTGTGGACCCAATGAGATAGATCACTACTTTTGTGATGTTCACCCTGTGTTGAAA | |
| CTTGCCTGCACAGAAACATACATTGTTGGTGTTGTTGTGACAGCCAACAGTGGTACGATTG | |
| CTCTGGGGAGTTTTGTTATCTTGCTAATCTCCTACAGCATCATCCTAGTTTCCCTGAGAAAG | |
| CAGTCAGCAGAAGGCAGGCGCAAAGCCCTCTCCACCTGTGGCTCCCACATTGCCATGGTCG | |
| TTATCTTTTTCGGCCCCTGTACTTTTATGTACATGCGCCCTGATACGACCTTTTCAGAGGAT | |
| AAGATGGTGGCTGTATTTTACACCATTATCACTCCCATGTTAAATCCTCTGATTTATACACT | |
| GAGAAATGCAGAAGTAAAGAATGCAATGAAGAAACTGTGGGGCAGAAATGTTTTCTTGGA | |
| GGCTAAAGGGAAATAG | |
| AOLFR169 sequences: | |
| MMDNHSSATEFHLLGFPGSQGLHHILFAIFFFFYLVTLMGNTVIIVIVCVDKRLQSPMYFFLSHL | (SEQ ID NO: 311) |
| STLEILVTTIIVPMMLWGLLFLGCRQYLSLHVSLNFSCGTMEFALLGVMAVDRYVAVCNPLRY | |
| NIIMNSSTCIWVVIVSWVFGFLSEIWPIYATFQFTFRKSNSLDHFYCDRGQLLKLSCDNTLLTEFI | |
| LFLMAVFILIGSLWTIVSYTYIISTILKIPSASGRRKAFSTFASHFTCVVIGYGSCLFLYVKPKQTQ | |
| GVEYNKIVSLLVSVLTPFLNPFIFTLRNDKVKEALRDGMKRCCQLLKD | |
| ATGATGGACAACCACTCTAGTGCCACTGAATTGCACCTTCTAGGCTTCCCTGGGTCCCAAG | (SEQ ID NO: 312) |
| GACTACACCACATTCTTTTTGCTATATTCTTTTTCTTCTATTTAGTGACATTAATGGGAAAC | |
| ACGGTCATCATTGTGATTGTCTGTGTGGATAAACGTCTGCAGTCCCCCATGTATTTCTTCCT | |
| CAGCCACCTCTCTACCCTGGAGATCCTGGTCACAACCATAATTGTCCCCATGATGCTTTGG | |
| GGATTGCTCTTCCTGGGATGCAGACAGTATCTTTCTCTACATGTATCGCTCAACTTTTCCTG | |
| TGGGACCATGGAGTTTGCATTACTTGGAGTGATGGCTGTGGACCGTTATGTGGCTGTGTGT | |
| ACCCTTTGAGGTACAACATCATTATGAACAGCAGTACCTGTATTTGGGTGGTAATAGTGT | |
| CATGGGTGTTTGGATTTCTTTCTGAAATCTGGCCCATCTATGCCACATTTCAGTTTACCTTC | |
| CGCAAATCAAATTCATTAGACCATTTTTACTGTGACCGAGGGCAATTGCTCAAACTGTCCT | |
| GCGATAACACTCTTCTCACAGAGTTTATCCTTTTCTTAATGGCTGTTTTTATTCTCATTGGT | |
| TCTTTGATCCCTACGATTGTCTCCTACACCTACATTATCTCCACCATCCTCAAGATCCCGTC | |
| AGCCTCTGGCCGGAGGAAAGCCTTCTCCACTTTTGCCTCCCACTTCACCTGTGTTGTGATTG | |
| GCTATGGCAGCTGCTTGTTTCTCTACGTGAAAGCCAAGCAAACACAGGGAGTTGAGTACAA | |
| TAAGATAGTTTCCCTGTTGGTTTCTGTGTTAACCCCCTTCCTGAATCCTTTCATCTTTACTCT | |
| TCGGAATGACAAAGTCAAAGAGGCCCTCCGAGATGGGATGAAACGCTGCTGTCAACTCCT | |
| GAAAGATTAG | |
| AOLFR170 sequences: | |
| MSFTSLIPSLCFSLTLPFLFCYLSLLPFLSAFLFITRWLLAFLSLFSVSVPVSSVSSSMVLCLYLSVS | (SEQ ID NO: 313) |
| ASPSVFCFSCMQGPILWIMANLSQPSEFVLLGFSSFGELQALLYGPFLMLYLLAFMGNTIIIVMVI | |
| ADTHLHTPMYFFLGNFSLLEILVTMTAVPRMLSDLLVPHKVITFTGCMVQFYFHFSLGSTSFLIL | |
| TDMALDRFVAICHPLRYGTLMSRAMCVQLAGAAWAAPFLAMVPTVLSRAHLDYGHGDVINH | |
| FFCDNEPLLQLSCSDTRLLEFWDFLMALTFVLSSFLVTLISYGYIVTTVLRIPSASSCQKAFSTCG | |
| SHLTLVFIGYSSTIFLYVRPGKAHSVQVRKVVALVTSVLTPFLNPFILTFCNQTVKTVLQGQMQ | |
| RLKGLCKAQ | |
| ATGTCTTTCACTTCTCTCATACCCTCACTCTGTTTCTCCTTGACTCTCCCATTCCTGTTTTGT | (SEQ ID NO: 314) |
| TATCTTTCTTTATTGCCGTTTCTTTCTGCTTTTCTGTTTATCACTCGCTGGCTACTTGCGTTT | |
| CTCTCTCTATTCTCTGTCTCTGTCCCTGTTTGTTCTGTTTCAAGTTCAATGGTTCTCTGTCTC | |
| TATCTCTCTGTTTCTGCCTCTCCGTCTGTCTTTTGTTTCTCTTGCATGCAGGGCCCCATACTG | |
| TGGATCATGGCAAATCTGAGCCAGCCCTCCGAATTTGTCCTCTTGGGCTTCTCCTCCTTTGG | |
| TGAGCTGCAGGCCCTTCTGTATGGCCCCTTCCTCATGCTTTATCTTCTCGCCTTCATGGGAA | |
| ACACCATCATCATAGTTATGGTCATAGCTGACACCCACCTACATACACCCATGTACTTCTTC | |
| CTGGGCAATTTTTCCCTGCTGGAGATCTTGGTAACCATGACTGCAGTGCCCAGGATGCTCT | |
| CAGACCTGTTGGTCCCCCACAAAGTCATTACCTTCACTGGCTGCATGGTCCAGTTCTACTTC | |
| CACTTTTCCCTGGGGTCCACCTCCTTCCTCATCCTGACAGACATGGCCCTTGATCGCTTTGT | |
| GGCCATCTGCCACCCACTGCGCTATGGCACTCTGATGAGCCGGGCTATGTGTGTCCAGCTG | |
| GCTGGGGCTGCCTGGGCAGCTCCTTTCCTAGCCATGGTACCCACTGTCCTCTCCCGAGCTC | |
| ATCTTGATTACTGCCATGGCGACGTCATCAACCACTTCTTCTGTGACAATGAACCTCTCCTG | |
| CAGTTGTCATGCTCTGACACTCGCCTGTTGGAATTCTGGGACTTTCTGATGGCCTTGACCTT | |
| TGTCCTCAGCTCCTTCCTGGTGACCCTCATCTCCTATGGCTAGATAGTGACCACTGTGCTGC | |
| GGATCCCCTCTGCCAGCAGCTGCCAGAAGGCTTTCTCCACTTGCGGGTCTCACCTCACACT | |
| GGTCTTCATCGGCTACAGTAGTACCATCTTTCTGTATGTCAGGGCTGGCAAAGCTCACTCT | |
| GTGCAAGTCAGGAAGGTCGTGGCCTTGGTGACTTCAGTTCTCACCCCCTTTCTCAATCCCT | |
| TTATCCTTACCTTCTGCAATCAGACAGTTAAAACAGTGCTACAGGGGCAGATGCAGAGGCT | |
| GAAAGGCCTTTGCAAGGCACAATGA | |
| AOLFR171 sequences: | |
| MVGNLLIWVTTIGSPSLGSLMYFFLAYLSLMDAIYSTAMSPKLMIDLLCDKIAISLSACMGQLFI | (SEQ ID NO: 315) |
| EHLLGGAEVFLLVVMAYDRYVAISKPLHYLNIMNRLVCILLLVVAMIGGFVHSVVQIVFLYSLP | |
| ICGPNVIDHSVCDMYPLLELLCLDTYFIGLTVVANGGIICMVIFTFLLISCGVILNFLKTYSQEER | |
| HKALPTCISHIIVVALVFVPCIFMYVRPVSNFPFDKLMTVFYSIITLMLNPLIYSLRQSEMKNAM | |
| KNLWCEKLSIVRKRVSPTLNIFIPSSKATNRR | |
| ATGGTGGGAAACCTCCTCATTTGGGTGACTACTATTGGCAGCCCCTCCTTGGGCTCCCTAA | (SEQ ID NO: 316) |
| TGTACTTCTTCCTTGCCTACTTGTCACTTATGGATGCCATATATTCCACTGCCATGTCACCC | |
| AAATTGATGATAGACTTACTCTGTGATAAAATCGCTATTTCCTTGTCAGCTTGCATGGGTC | |
| AGCTCTTCATAGAACACTTACTTGGTGGTGCAGAGGTCTTCCTTTTGGTGGTGATGGCCTA | |
| TGATCGCTATGTGGCTATCTCTAAGCCGCTGCACTATTGAACATCATGAATCGACTGGTT | |
| TGCATCCTTCTGTTGGTGGTGGCCATGATTGGAGGTTTTGTGCACTCTGTGGTTCAAATTGT | |
| CTTTCTGTACAGTCTACCAATCTGTGGCCCCAATGTTATTGACCACTCTGTCTGTGACATGT | |
| ACCCATTGTTGGAACTGTTGTGCCTTGACACCTACTTTATAGGACTCACTGTGGTTGCCAA | |
| TGGTGGAATAATTTGTATGGTCATCTTTACCTTTCTGCTAATCTCCTGTGGAGTCATCCTAA | |
| ACTTCCTTAAAACTTACAGTCAGGAAGAGAGGCATAAAGCCCTGCCTACCTGCATCTCCCA | |
| CATCATTGTGGTTGCCCTCGTTTTTGTTCCCTGTATTTTTATGTATGTTAGACCCGTTTCCA | |
| ACTTTCCCTTTGATAAATTAATGACTGTGTTTTATTCAATTATCACACTCATGTTGAATCCT | |
| TTAATATACTCGTTGAGACAATCAGAGATGAAAAATGCTATGAAAAATCTCTGGTGTGAA | |
| AAGTTAAGTATAGTTAGAAAAAGAGTATCTCCCACACTGAACATATTTATTCCTAGTTCTA | |
| AGGCAACAAATAGGCGGTAA | |
| AOLFR172 sequences: | |
| MAETLQLNSTFLHPNFFILTGFPGLGSAQTWLTLVFGPIYLLALLGNGALPAVVWIDSTLHQPM | (SEQ ID NO: 317) |
| FLLLAILAATDLGLATSIAPGLLAVLWLGPRSVPYAVCLVQMFFVHALTAMESGVLLAMACDR | |
| AAAIGRPLHYPVLVTKACVGYAALALALKAVAIVVPFPLLVAKFEHFQAKTIGHTYCAHMAV | |
| VELVVGNTQATNLYGLALSLAISGMDILGITGSYGLIAHAVLQLPTREAIHAKAFGTCSSHICVIL | |
| AFYIPGLFSYLAHRFGHHTVPKPVHILLSNIYLLLPPALNPLIYGARTKQIRDRILETFTFRKSPL | |
| ATGGCAGAAACTCTACAACTCAATTCCACCTTCCTAGACCCAAACTTCTTCATACTGACTG | (SEQ ID NO: 318) |
| GCTTTCCAGGGCTAGGAAGTGCCCAGACTTGGCTGACACTGGTCTTTGGGCCCATTTATCT | |
| GCTGGCCCTGCTGGGCAATGGAGCACTGCCGGCAGTGGTGTGGATAGACTCCACACTGCA | |
| CCAGCCCATGTTTCTACTGTTGGCCATCCTGGCAGCCACAGACCTGGGCTTAGCCACATCT | |
| ATAGCCCCAGGGTTGCTGGCTGTGCTGTGGCTTGGGCCCCGATCTGTGCGATATGCTGTGT | |
| GCCTGGTCCAGATGTTCTTTGTACATGCACTGACTGCCATGGAATCAGGTGTGCTTTTGGC | |
| CATGGCCTGTGATCGTGCTGCGGCAATAGGGCGTCCAGTGCAGTACCCTGTCCTGGTCACC | |
| AAAGCCTGTGTGGGTTATGCAGCCTTGGCCCTGGGACTGAAAGCTGTGGCTATTGTTGTAC | |
| CTTTCCCACTGCTGGTGGCAAAGTTTGAGCACTTCCAAGCCAAGACCATAGGCCATACCTA | |
| TTGTGCACACATGGCAGTGGTAGAACTGGTGGTGGGTAACACACAGGCCACCAACTTATA | |
| TGGTCTGGCACTTTCACTGGCCATCTCAGGTATGGATATTCTGGGTATCACTGGCTCCTAT | |
| GGACTCATTGCCCATGCTGTGCTGCAGCTACCTACCCGGGAGGCCCATGCCAAGGCCTTTG | |
| GTACATGTAGTTCTCACATCTGTGTCATTCTGGCCTTCTACATACCTGGTCTCTTCTCCTAC | |
| CTCGCACACCGCTTTGGTCATCACACTGTCCCAAAGCCTGTGCACATCCTTCTCTCCAACAT | |
| CTACTTGCTGCTGCCACCTGCCCTCAACCCCCTCATCTATGGGGCCCGCACCAAGCAGATC | |
| AGAGAGCGACTCCTGGAAACCTTCACATTCAGAAAAAGCCCGTTGTAA | |
| AOLFR173 sequences: | |
| MSHTNVTIFHPAVFVLPGIPGLEAYHIWLSIPLCLIYITAVLGNSILIVVIVMERNLHVPMYFFLS | (SEQ ID NO: 319) |
| MLAVMDILLSTTTVPKALAIFWLQAHNIAFDACVTQGFFVHMMFVGESAILLAMAFDRFVAIC | |
| APLRYTTVLTWPVVGRIALAVITRSFCIIFPVIFLLKRLPFCLTNIVPHSYCEHIGVARLACADITV | |
| NIWYGFSVPIVMVILDVILIAVSYSLILRAVFRLPSQDARHKALSTCGSHLCVILMFYVPSFFTLL | |
| THHFGRNIPQHVHILLANLYVAVPPMLNPIVYGVKTKQIREGVAHRFFDIKTWCCTSPLGS | |
| ATGAGTCACACCAATGTTACCATCTTCCATCCTGCAGTTTTTGTCCTTCCTGGCATCCCTGG | (SEQ ID NO: 320) |
| GTTGGAGGCTTATCACATTTGGCTGTCAATACCTCTTTGCCTCATTTACATCACTGCAGTCC | |
| TGGGAAACAGCATCCTGATAGTGGTTATTGTCATGGAACGTAACCTTCATGTGCCCATGTA | |
| TTTCTTCCTCTCAATGCTGGCCGTCATGGACATCCTGCTGTCTACCACCACTGTGCCCAAGG | |
| CCCTAGCCATCTTTTGGCTTCAAGCACATAACATTGCTTTTGATGCCTGTGTCACCCAAGGC | |
| TTCTTTGTCCATATGATGTTTGTGGGGGAGTCAGCTATCCTGTTAGCCATGGCCTTTGATCG | |
| CTTTGTGGCCATTFFGTGCCCCACTGAGATATACAACAGTGCTAACATGGCCTGTTGTGGGG | |
| AGGATTGCTCTGGCCGTCATCACCCGAAGCTTCTGCATCATCTTCCCAGTCATATTCTTGCT | |
| GAAGCGGCTGCCCTTCTGCCTAACCAACATTGTTCGTCACTCCTACTGTGAGCATATTGGA | |
| GTGGCTCGTTTAGCCTGTGCTGACATCACTGTTAACATTTGGTATGGCTTCTCAGTGCCCAT | |
| TGTCATGGTCATCTTGGATGTTATCCTCATCGCTGTGTCTTACTCACTGATCCTCCGAGCAG | |
| TGTTTCGTTTGCCCTCCCAGGATGCTCGGCACAAGGCCCTCAGCACTTGTGGCTCCCACCT | |
| CTGTGTCATCCTTATGTTTTATGTTCCATCCTTCTTTACCTTATTGACCCATCATTTTGGGCG | |
| TAATATTCCTCAACATGTCCATATCTTGCTGGCCAATCTTTATGTGGCAGTGCCACCAATGC | |
| TGAACCCCATTGTCTATGGTGTGAAGACTAAGCAGATACGTGAGGGTGTAGCCCACCGGTT | |
| CTTTGACATCAAGACTTGGTGCTGTACCTCCCCTCTGGGCTCATGA | |
| AOLFR175 sequences: | |
| MHFLSQNDLNINLIPHLCLHRHSVIAGAFTIHRHMKIFNSPSNSSTFTGFILLGFPCPREGQILLFV | (SEQ ID NO: 321) |
| LFTVVYLLTLMGNGSIICAVHWDQRLHAPMYILLANFSFLEICYVTSTVPSMLANFLSDTKIISF | |
| SGCFLQFYFFFSLGSTECFFLAVMAFDRYLAICRPLRYPTIMTRRLCTNLVVNCWVLGFIWFLIPI | |
| VNISQMSFCGSRIIDHFLCDPAPLLTLTCKKGPVIELVFSVLSPLPVFMLFLFIVGSYALVVRAVL | |
| RVPSAAGRRKAFSTCGSHLAVVSLFYGSVLVMYGSPPSKNEAGKQKTVTLFYSVVTPLLNPVI | |
| YSLRNKDMRKALKKFWGT | |
| ATGCATTTTCTTTCCCAAAATGATTTAAATATAAATCTGATTCCCCATCTATGTTTGCACCG | (SEQ ID NO: 322) |
| TCATTCAGTAATTGCTGGTGCTTTTACAATTCACAGGCACATGAAATCTTCAACAGCCCC | |
| AGCAACTCCAGCACCTTCACTGGCTTCATCCTCCTGGGCTTCCCTTGCCCCAGGGAGGGGC | |
| AGATCCTCCTCTTTGTGCTGTTCAGTGTTGTTTACCTCCTGACCCTCATGGGCAATGGTTCC | |
| ATCATCTGTGCTGTGCACTGGGATCAGAGACTCCACGCCCCCATGTACATCCTGCTCGGCA | |
| ACTTCTCCTTCTTGGAGATATGTTATGTCACCTCCACAGTCCCCAGCATGCTGGCCAACTTC | |
| CTCTCTGACACCAAGATCATCTCGTTCTCTGGCTGCTTCCTCCAGTTCTACTTTTTCTTCTCC | |
| TTGGGCTCTACAGAATGCTTTTTCCTGGCAGTTATGGCATTTGATCGATACCTTGCCATCTG | |
| TCGGCCTCTACGCTATCCAACCATTATGACCAGACGTCTCTGTACCAATCTTGTGGTCAATT | |
| GCTGGGTACTTGGTTTCATGTGGTTCTTGATTCCTATCGTCAACATCTCCCAAATGTCCTTC | |
| TGTGGATCTAGGATTATTGACCACTTCCTATGTGACCCAGCTCCTCTTCTAACTCTCACTTG | |
| CAAAAAAGGCCCTGTGATAGAGCTTGTCTTTTCTGTCTTAAGTCCTCTGCCTGTCTTTATGC | |
| TCTTTCTCTTCATTGTGGGGTCCTATGCTCTGGTCGTGAGAGCTGTGTTGAGGGTCCCTTCA | |
| GCAGCTGGGAGAAGAAAGGCTTTCTCCACCTGTGGGTCTCACCTGGCTGTGGTTTCACTGT | |
| TCTACGGCTCAGTACTGGTCATGTATGGGAGCCCACCATCTAAGAATGAAGCTGGAAAGC | |
| AGAAGACTGTGACTCTGTTTTATTCTGTTGTTACCCCACTGCTTAACCCTGTGATATATAGT | |
| CTTAGGAACAAAGATATGAGAAAAGCTCTGAAGAAATTTTGGGGAACATAA | |
| AOLFR176 sequences: | |
| MFFIIHSLVTSVFLTALGPQNRTMHFVTEFVLLGFHGQREMQSCFFSFILVLYLLTLLGNGAIVC | (SEQ ID NO: 323) |
| AVKLDRRLHTPMYILLGNFAFLEIWYISSTVPNMLVNILSEIKTISFSGCFLQFYFFFSLGTTECFF | |
| LSVMAYDRYLAICRPLHYPSIMTGKIFCIILVCVCWVGGFLCYPVPIVLISQLPFCGPNIIDHLVCD | |
| PGPLFALACISAPSTELICYTFNSMIIFGPFLSILGSYTLVIRAVLCIPSGAGRTKAFSTCGSHLMV | |
| VSLFYGTLMVMYVSPTSGNPAGMQKIITLVYTAMTPFLNPLIYSLRNKDMKDALKRVLGLTVS | |
| QN | |
| ATGTTCTTTATTATTCATTCTTTGGTTACTTCTGTTTTTCTAACAGCTTTTGGGACCCCAGAA | (SEQ ID NO: 324) |
| CAGAACAATGGATTTTGTGACTGAGTTTGTCCTCCTGGGTTTCCATGGTCAAAGGGAGATG | |
| CAGAGCTGCTTCTTCTCATTCATCCTGGTTCTCTATCTCCTGACACTGCTAGGGAATGGAGC | |
| TATTGTCTGTGCAGTGAAATTGGACAGGCGGCTCCACACACCCATGTACATCCTTCTGGGA | |
| AACTTTGCCTTTCTAGAGATCTGGTACATTTCCTCCACTGTCCCAAACATGCTAGTCAATAT | |
| CCTCTCTGAGATTAAAACCATCTCCTTCTCTGGTTGCTTCCTGCAATTCTATTTCTTTTTTTC | |
| ACTGGGTACAACAGAGTGTTTCTTTTTATCAGTTATGGCTTATGATCGGTAGCTGGCCATC | |
| TGTCGTCCATTACACTACCCCTCCATCATGACTGGGAAGTTCTGTATAATTCTGGTCTGTGT | |
| ATGCTGGGTAGGCGGATTTCTCTGCTATCCAGTCCCTATTGTTCTTATCTCCCAACTTCCCT | |
| TCTGTGGGCCCAACATCATTGACCACTTGGTGTGTGACCCAGGCCCATTGTTTGCACTGGC | |
| CTGCATCTCTGCTCCTTCCACTGAGCTTATCTGTTACACCTTCAACTCGATGATTATCTTTG | |
| GGCCCTTCCTCTGCATCTTGGGATCTTACACTCTGGTCATCAGAGCTGTGCTTTGTATTCCC | |
| TCTGGTGCTGGTCGAACTAAAGCTTTCTCCACATGTGGGTCCCACCTAATGGTGGTGTCTC | |
| TATTCTATGGAACCCTTATGGTGATGTATGTGAGCCCAACATCAGGGAACCCAGCAGGAAT | |
| GCAGAAGATCATCACTCTGGTATACACAGCAATGACTCCATTCTTAAATCCCCTTATCTAT | |
| AGTCTTCGAAACAAAGACATGAAAGATGCTCTAAAGAGAGTCCTGGGGTTAACAGTTAGC | |
| CAAAACTGA | |
| AOLFR177 sequences: | |
| MSFFFVDLRPMNRSATHIVTEFILLGFPGCWKIQIFLFSLFLVIYVLTLLGNGAIIYAVRCNPLLH | (SEQ ID NO: 325) |
| TPMYFLLGNFAFLEIWYVSSTIPNMLVNILSKTKAISFSGCFLQFYFFFSLGTTECLFLAVMAYD | |
| RYLAICHPLQYPAIMTVRFCGKLVSFCWLIGFLGYPIPIFYISQLPFCGPNIIDHFLCDMDPLMAL | |
| SCAPAPITECIFYTQSSLVLFFTSMYILRSYILLLTAVFQVPSAAGRRKAFSTCGSHLVVVSLFYG | |
| TVMVMYVSPTYGIPTLLQKILTLVYSVTTPLFNPLIYTLRNKDMKIALRNXTLFGMRIRQNS | |
| ATGTCTTTCTTCTTTGTAGACTTAAGACCCATGAACAGGTCAGCAACACACATCGTGACAG | (SEQ ID NO: 326) |
| AGTTTATTCTCCTGGGATTCCCTGGTTGCTGGAAGATTCAGATTTTCCTCTTCTCATTGTTT | |
| TTGGTGATTTATGTCTTGACCTTGCTGGGAAATGGAGCCATCATCTATGCAGTGAGATGCA | |
| ACCCACTACTACACACCCCCATGTACTTTCTGCTGGGAAATTTTGCCTTCCTTGAGATCTGG | |
| TATGTGTCCTCCACTATTCCTAACATGCTAGTCAACATTCTCTCCAAGACCAAGGCCATCTC | |
| ATTTTCTGGGTGCTTCCTCCAGTTCTATTTCTTCTTTTCACTGGGAACAACTGAATGTCTCT | |
| TTCTGGCAGTAATGGCTTATGATCGATACCTGGCCATCTGCCACCCACTGCAGTACCCTGC | |
| CATCATGACTGTAAGGTTCTGTGGTAAGCTGGTGTCTTTCTGTTGGCTTATTGGATTCCTTG | |
| GATACCCAATTCCCATTTTCTACATCTCCCAAGTCCCCTTCTGTGGTCCTAATATCATTGAT | |
| GACTTCCTGTGTGACATGGACCCATTGATGGCTCTATCCTGTGCCCCAGCTCCCATAACTG | |
| AATGTATTTTCTATACTCAGAGCTCCCTTGTCCTGTTTTTCACTAGTATGTACATTCTTCGA | |
| TCCTATATCCTGTTACTAACAGCTGTTTTTCAGGTCCCTTCTGCAGCTGGTCGGAGAAAAG | |
| CCTTCTCTACCTGTGGTTCTCATTTGGTTGTGGTATCTCTTTTGTATGGGACAGTCATGGTA | |
| ATGTATGTAAGTCCTACATATGGGATCCCAACTTTATTGCAGAAGATCCTCACACTGGTAT | |
| ATTCAGTAACGACTCCTCTTTTTAATCCTCTGATCTATACTCTTCGTAATAAGGACATGAAA | |
| CTCGCTCTGAGTGTCCTGTTTGGAATGAGAATTCGTCAAAATTCGTGA | |
| AOLFR178 sequences: | |
| MVGANHSVVSEFVFLGLTNSWEIRLLLLVFSSMFYMASMMGNSLILLTVTSDPHLHSPMYFLL | (SEQ ID NO: 327) |
| ANLSFIDLGVSSVTSPKMIYDLFRKKHEVISFGGCIAQIFFIHVIGGVEMVLLIAMAFDRYVAICKP | |
| LQYLTIMSPRMCMFFLVAAWVTGLIHSVVQLVFVVNLPFCGPNVSDSFYCDLPRFIKLACTDSY | |
| RLEFMVTANSGFISLGSFFILIISYVVIILTVLKHSSAGLSKALSTLSAHVSVVVLFFGPLIFVYTW | |
| PSPSTHLDKFLAIFDAVLTPVLNPIIYTFRN | |
| ATGGTTGGGGCAAATCACTCCGTGGTGTCAGAGTTTGTGTTCCTGGGACTCACCAATTCCT | (SEQ ID NO: 328) |
| GGGAGATCCGACTTCTCCTCCTTGTGTTCTCCTCCATGTTTTACATGGCGAGTATGATGGGA | |
| AAGTCTCTCATTTTGCTCACTGTGACTTCTGACCCTCAGTTGCACTCCCCCATGTATTTTCT | |
| GTTAGCCAACCTCTCCTTCATTGACCTGGGTGTTTCCTCTGTCACTTCTCCCAAAATGATTT | |
| ATGACCTGTTCAGAAAGCACGAAGTCATCTCCTTTGGAGGCTGCATCGCTCAAATCTTCTT | |
| CATCCACGTCATTGGCGGTGTGGAGATGGTGCTGCTCATAGCCATGGCCTTTGACAGATAT | |
| GTGGCCATATGTAAGCCCCTCCAGTACCTGACCATTATGAGCCCAAGAATGTGCATGTTCT | |
| TCTTAGTGGCTGCCTGGGTGACCGGCCTTATCCACTCTGTAGTTCAATTGGTTTTTGTAGTA | |
| AACTTGCCCTTCTGTGGTCCTAATGTATCGGACAGCTTTTACTGTGACCTTCCTCGGTTCAT | |
| CAAACTTGCCTGCACAGACAGCTACCGACTGGAGTTCATGGTTACAGCCAACAGTGGATTC | |
| ATCTCTCTGGGCTCCTTCTTCATACTGATCATTTCCTATGTGGTCATCATTCTCACTGTTCT | |
| GAAACACTCTFFCAGCTGGTTTATCCAAGGCTCTGTCCACCCTTTCAGCTCACGTCAGTGTG | |
| GTAGTTTTGTTCTTTGGTCCTTTGATTTTTGTCTATACGTGGCCATCTCCCTCCACACACCT | |
| GGATAAGTTTCTGGCCATCTTTGATGCAGTTCTCACTCCTGTTTTTAATCCTATCATCTACA | |
| CATTCAGGAATTGA | |
| AOLFR179 sequences: | |
| MNGMNHSVVSEFVFMGLTNSREIQLLLFVFSLLFYFASMMGNLVIVFTVTMDAHLHSPMYFLL | (SEQ ID NO: 329) |
| ANLSIIDMAFCSITAPKMICDIFKKHKAISFRGCITQIFFSHALGGTEMVLLIAMAFDRYMAICKP | |
| LHYLTIMSPRMCLYFLATSSIIGLIHSLVQLVFVVDLPFCGPNIFDSFYCDLPRLLRLACTNTQEL | |
| EFMVTVNSGLISVGSFVLLVISYIFILFTVWKHSSGGLAKALSTLSAHVTVVILFFGPLMFFYTW | |
| PSPTSHLDKYLAIFDAFITPFLNPVIYTFRNKDMKVAMRRLCSRLAHFTKIL | |
| ATGAATGGAATGAATCACTCTGTGGTATCAGAATTTGTATTCATGGGACTCACCAACTCAC | (SEQ ID NO: 330) |
| GGGAGATTCAGCTTCTACTTTTTGTTTTCTCTTTGTTGTTCTACTTTGCGAGCATGATGGGA | |
| AACCTTGTCATTGTATTCACTGTAACCATGGATGCTCATCTGCACTCCCCCATGTATTTCCT | |
| CCTGGCTAACCTCTCAATCATTGATATGGCATTTTGCTCAATTACAGCCCCTAAGATGATTT | |
| GTGATATTTTCAAGAAGCACAAGGCCATGTCCTTTCGGGGATGTATTACTCAGATCTTCTT | |
| TAGCCATGCTCTTGGGGGCACTGAGATGGTGCTGGTCATAGCCATGGCCTTTGACAGATAC | |
| ATGGCCATATGTAAACCTCTCCACTACCTGACCATGATGAGCCCAAGAATGTGTCTATACT | |
| TTTTAGCCACTTCCTCTATCATTGGCCTTATCCACTCATTGGTCCAATTAGTTTTTGTGGTA | |
| GATTTACCTTTTTGTGGTCCTAATATCTTTGACAGTTTTTACTGTGATCTCCCTCGGCTCCT | |
| CAGACTTGCCTGTACCAACACGCAAGAACTGGAGTTCATGGTCACTGTCAATAGTGGACTC | |
| ATTTCTGTGGGCTCCTTTGTCTTGCTGGTAATTTCCTACATCTTCATTCTGTTCACTGTTTG | |
| GAAACATTCTTCTGGTGGTCTAGCCAAGGCCCTCTCTACCCTGTGAGCTCATGTCACTGTG | |
| GTCATCTTGTTCTTTGGGCCACTGATGTTTTTCTACAGATGGCCTTCTCCCACATCACACCT | |
| GGATAAATATCTTGCTATTTTGATGCATTTATTACTCCTTTTCTGAATCCAGTTATCTACA | |
| CATTCAGGAACAAAGACATGAAAGTGGCAATGAGGAGAGTGTGCAGTCGTCTTGCGCATT | |
| TTACAAAGATTTTGTAA | |
| AOLFR180 sequences: | |
| MTNKMYAIYIKNLNYFSFLIVQCLQPTMAIFNNTTSSSSNFLLTAFPGLECAHVWISIPVCCLYTI | (SEQ ID NO: 331) |
| ALLGNSMIFLVIITKRRLHKPMYYFLSMLAAVDLCLTITTLPTVLGVLWFHAREISFKACFIQMF | |
| FVHAFSLLESSVLVAMAFDRFVAICNPLNYATILTDPIMVLVIGLVICIPYAVFLLPLLVAINTVSF | |
| HGGHELSHPFCYHPEVIKYTYSKPWISSFWGLFLQLYLNGTDVLFILFSYVLILRTVLGIVARKK | |
| QQKALSTCVCHICAVTIFYVPLISLSLAHRLFHSTPRVLCSTLANIYLLLPPVLNPIIYSLKTKTIR | |
| QAMFQLLQSKGSWGFNVRGLRGRWD | |
| ATGACTAATAAAATGTATGCTATATATATAAAGAATCTTAATTATTTTTCTTTCCTCATAGT | (SEQ ID NO: 332) |
| TCAGTGTCTTCAACCAACCATGGCAATATTCAATAACACCACTTCGTCTTCCTCAAACTTCC | |
| TCCTCACTGCATTCCCTGGGCTGGAATGTGCTCATGTCTGGATCTCCATTCCAGTCTGCTGT | |
| CTCTACACCATTGCCCTCTTGGGAAACAGTATGATCTTTCTTGTCATCATTACTAAGCGGA | |
| GACTCCACAAACCCATGTATTATTTCCTCTCCATGCTGGCAGCTGTTGATCTATGTCTGACC | |
| ATTACGACCCTTCCCACTGTGCTTGGTGTTCTCTGGTTTCATGCCCGGGAGATCAGCTTTAA | |
| AGCTTGCTTCATTCAAATGTTCTTTGTGCATGCTTTCTCCTTGCTGGAGTCCTCGGTGCTGG | |
| TAGCCATGGCCTTTGACCGCTTCGTGGCTATCTGTAACCCACTGAACTATGCTACTATCCTC | |
| ACAGACAGGATGGTCCTGGTGATAGGGCTGGTCATGTGCATTAGACCAGCAGTTTTCTTAC | |
| TTCCCCTTCTTGTAGCCATAAACACTGTGTCTTTTCATGGGGGTCACGAGCTTTCCCATCCA | |
| TTTTGCTACCACCCAGAAGTGATCAAATACACATATTCCAAACCTTGGATCAGCAGTTTTT | |
| GGGGACTGTTTCTTCAGCTCTACCTGAATGGCACTGACGTATTGTTTATTCTTTTCTCCTAT | |
| GTCCTGATCCTCCGTACTGTTCTGGGCATTGTGGCCCGAAAGAAGCAACAAAAAGCTCTCA | |
| GCACTTGTGTCTGTCACATCTGTGCAGTCACTATTTTCTATGTGCCACTGATCAGCCTCTCT | |
| TTGGCACACCGCCTCTTCCACTCCACCCCAAGGGTGCTCTGTAGCACTTTGGCCAATATTTA | |
| TCTGCTCTTACCACCTGTGCTGAACCCTATCATTTACAGCTTGAAGACCAAGACAATCCGC | |
| CAGGCTATGTTCCAGCTGCTCCAATCCAAGGGTTCATGGGGTTTTAATGTGAGGGGTCTTA | |
| GGGGAAGATGGGATTGA | |
| AOLFR181 sequences: | |
| MSVLNNSEVKLFLLIGIPGLEHAHIWFSIPICLMYLLAIMGNCTILFIIKTEPSLHEPMYYFLAML | (SEQ ID NO: 333) |
| AVSDMGLSLSSLPTMLRVFLFNAMGISPNACFAQEFFIHGFTVMESSVLLIMSLDRFLAHNPLR | |
| YSSILTSNRVAKMGLILAIRSILLVIPFPFTLRRLKYCQKNLLSHSYCLHQDTMKLACSDNKTNV | |
| IYGFFIALCTMLDLALIVLSYVLILKTILSIASLAERLKALNTCVSHICAVLTFYVPIITLAAMHHF | |
| AKHKSPLVVILIADMFLLVPPLMMIVYCVKTRQIWEKALGKILNVCGR | |
| ATGTCTGTTCTCAATAACTCCGAAGTCAAGCTTTTCCTTCTGATTGGGATCCCAGGACTGG | (SEQ ID NO: 334) |
| AACATGGCCACATTTGGTTCTCCATCCCCATTTGCCTCATGTACCTGCTTGCCATCATGGGC | |
| AACTGCACCATTCTCTTTATTATAAAGACAGAGCCCTCGCTTCATGAGCCCATGTATTATTT | |
| CCTTGCCATGHGGCTGTCTCTGACATGGGCCTGTCCCTCTCCTCCCTTCCTACCATGTTGA | |
| GGGTCTTCTTGTTCAATGCCATGGGAATTTCACCTAATGCCTGCTTTGCTCAAGAATTCTTC | |
| ATTCATGGATTCACTGTCATGGAATCCTCAGTACTTCTAATTATGTCTFFTGGACCGCTTTCT | |
| TGCCATTCACAATCCCTTAAGATACAGTTCTATCCTCACTAGCAACAGGGTTGCTAAAATG | |
| GGACTTATTTTAGCCATTAGGAGCATTCTCTTAGTGATTCCATTTCCCTTCACCTTAAGGAG | |
| ATTAAAATATTGTCAAAAGAATCTTCTTTCTCACTCATACTGTCTTCATCAGGATACCATGA | |
| AGCTGGCCTGCTCTGACAAGAAGACCAATGTCATCTATGGCTTCTTCATTGCTCTCTGTACT | |
| ATGCTGGACTTGGCACTGATTGTTfTGTCTTATGTGCTGATCTTGAAGACTATACTCAGCAT | |
| TGCATCTTTGGCAGAGAGGCTTAAGGCCCTAAATACCTGTGTCTCCCACATCTGTGCTGTG | |
| CTCACCTTCTATGTGCCCATCATCACCCTGGCTGCCATGCATCACTTTGCCAAGCACAAAA | |
| GCCCTCTTGTTGTGATCCTTATTGCAGATATGTTCTTGTTGGTGCCGCCCCTTATGAACCCC | |
| ATTGTGTACTGTGTAAAGACTCGACAAATCTGGGAGAAGATCTTGGGGAAGTTGCTTAAT | |
| GTATGTGGGAGATAA | |
| AOLFR182 sequences: | |
| MTLGSLGNSSSSVSATFLLSGIPGLERMHIWISIPLCFMYLVSIPGNCTILFIIKTERSLHEPMYLFL | (SEQ ID NO: 335) |
| SMLALIDLGLSLCTLPTVLGIFWVGAREISHDACFAQLFFIHCFSFLESSVLLSMAFDRFVAICHP | |
| LHYVSILTNTVIGRIGLVSLGRSVALIFPLPFMLKYITYCGSPVLSHSYCLHQEVMKLACADMK | |
| ANSIYGMFVIVSTVGIDSLLILFSYALILRTVLSIASRAERFKALNTCVSHICAVLLFYTPMIGLSV | |
| IHRFGKQAPHLVQVVMGFMYLLFPPVMNPIVYSVKTKQIRDRVTHAFCY | |
| ATGACCCTGGGATCCCTGGGAAACAGCAGCAGCAGCGTTTCTGCTACCTTCCTGCTGAGTG | (SEQ ID NO: 336) |
| GCATCCCTGGGCTGGAGCGCATGCACATCTGGATCTGCATCCCACTGTGCTTCATGTATCT | |
| GGTTTCCATCCCGGGCAACTGCACAATTCTTTTTATCATTAAAACAGAGCGCTCACTTCAT | |
| GAACCTATGTATCTCTTCCTGTCCATGCTGGCTCTGATTGACCTGGGTCTCTCCCTTTGCAC | |
| TCTCCCTACAGTCCTGGGCATCTTTTGGGTTGGAGCACGAGAAATTAGCCATGATGCCTGC | |
| TTTGCTCAGCTCTTTTTCATTCACTGCTTCTCCTTCCTCGAGTCCTCTGTGCTACTGTCTATG | |
| GCCTTTGACCGCTTTGTGGCTATCTGCCACCCCTTGCACTATGTTTCCATTCTCACCAACAC | |
| AGTCATTGGCAGGATTGGCCTGGTCTCTCTGGGTCGTAGTGTAGCACTCATTTTTCCATTA | |
| CCTTTTATGCTCAAAAGATTCCCCTATTGTGGCTCCCCAGTTCTCTCACATTCTTATTGTCT | |
| CCACCAAGAAGTGATGAAATTGGCCTGTGCCGACATGAAGGCCAACAGCATCTACGGCAT | |
| GTTTGTCATCGTCTCTACAGTGGGTATAGACTCACTGCTCATCCTCTTCTCTTATGCTCTGA | |
| TCCTGCGCACCGTGGTGTCCATCGCCTCCAGGGCTGAGAGATTCAAGGCCCTTAACACCTG | |
| TGTTTCCCACATCTGTGCTGTGCTGCTCTTCTACACTCCCATGATTGGCCTCTCTGTCATCC | |
| ATCGCTTTGGAAAGCAGGCACCCCACCTGGTCCAGGTGGTCATGGGTTTCATGTATCTTCT | |
| CTTTCCTCGTGTGATGAATCCCATTGTCTACAGTGTGAAGACCAAACAGATCCGGGATCGA | |
| GTGACGCATGCCTTTTGTTACTAA | |
| AOLFR183 sequences: | |
| MTNLNASQANHRNFILTGIPGTPDKNPWLAFPLGFLYTLTLLGNGTILAVIKVEPSLHEPTYYFL | (SEQ ID NO: 337) |
| SILALTDVSLSMSTLPSMLSIYWFNAPQIVFDACIMQMFFIHVFGIVESGVLVSMAFDRFVAIRN | |
| PLHYVSILTHDVIRKTGISVLTRAVCVVFPVPFLIKCLPFCHSNVLSHSYCLHQNMMRLACASTR | |
| INSLYGLIVVIFTLGLDVLLTLLSYVLTLKTVLGIVSRGERLKTLSTCLSHMSTVLLFYVPFMGA | |
| ASMIHRFWEHLSPVVHMVMADIYLLLPPVLNPIVYSVKTKQI | |
| ATGACGAACTTGAATGCATCACAGGCCAACGACCGTAACTTCATTCTGACAGGTATCCCAG | (SEQ ID NO: 338) |
| GAACGCCAGACAAGAACCCATGGTTGGCCTTTCCCCTGGGATTTCTCTACACACTCACACT | |
| CCTGGGAAATGGTACCATCCTAGCTGTCATCAAGGTGGAGCCAAGTCTCCATGAGCCCACG | |
| TATTACTTCCTTTCTATCTTGGCTCTCACTGACGTTAGTCTCTCCATGTCCACCTTGCCCTCC | |
| ATGCTCAGCATCTACTGGTTTAATGCCCCTCAGATTGTTTTTGATGCATGGATCATGCAGAT | |
| GTTCTTCATCCATGTATTTGGAATAGTAGAATCAGGAGTCCTAGTGTCCATGGCCTTTGAC | |
| AGATTTGTGGCCATCCGAAACCCATTACACTATGTTTCCATCCTCACTCACGATGTTATTCG | |
| AAAGACTGGAATATCTGTCCTCACCCGGGCAGTCTGTGTGGTATTCCCTGTGCCCTTCCTT | |
| ATAAAGTGCCTACCCTTCTGCCATTCCAATGTCTTGTCTCATTCATACTGTCTTCACCAAAA | |
| CATGATGCGGCTAGCTTGTGCCAGCACCCGCATCAACAGCCTCTACGGCCTCATCGTCGTC | |
| ATCTTCACACTGGGGCTCGATGTTCTCCTCACTCTACTGTCTTATGTACTCACCCTGAAGAC | |
| TGTGCTGGGCATTGTCTCCAGAGGTGAAAGGCTGAAAACCCTCAGCACATGCCTCTCTCAC | |
| ATGTCTACCGTGCTCCTCTTCTATGTTCCTTTTATGGGTGCTGCCTCCATGATCCACAGATT | |
| TTGGGAGCATTTATCACCAGTAGTGCACATGGTCATGGCTGATATATACCTACTGCTCCCG | |
| CCTGTGCTAAACCCCATTGTCTACAGTGTGAAGACCAAGCAAATTTGA | |
| AOLFR184 sequences: | |
| MSTLPTQIAPNSSTSMAPTFLLVGMPGLSGAPSWWTLPLIAVYLLSALGNGTILWIIALQPALHR | (SEQ ID NO: 339) |
| PMHFFLFLLSVSDIGLVTALMPTLLGIALAGAHTVPASACLLQMVFIHVFSVMESSVLLAMSID | |
| RALAICRPLHYPALLTNGVISKISLAISFRCLGLHLPLPFLLAYMPYCLPQVLTHSYCLHPDVARL | |
| ACPEAWGAAYSLFVVLSAMGLDPLLIFFSYGLIGKVLQGVESREDRWKAGQTCAAHLSAVLLF | |
| YIPMILLALINHPELPITQHTHTLLSYVHFLLPPLINPILYSVKMEIRKRILNRLQPRKVGGAQ | |
| ATGTCAACATTACCAACTCAGATAGCCCCCAATAGCAGCACTTCAATGGCCCCCACCTTCT | (SEQ ID NO: 340) |
| TGCTGGTGGGCATGCCAGGCCTATCAGGTGCACCGTCCTGGTGGACATTGCCCCTCATTGC | |
| TGTCTACCTTCTCTCTGCACTGGGAAATGGCACCATCCTCTGGATCATTGCCCTGCAGCCC | |
| GCCCTGCACCGCCCAATGCACTTCTTCCTCTTCTTGCTTAGTGTGTCTGATATTGGATTGGT | |
| CACTGCCCTGATGCCCACACTGCTGGGCATCGCCCTTGCTGGTGCTCACACTGTCCCTGCC | |
| TCAGCCTGCCTTCTACAGATGGTTTTTATCGATGTCTTTTCTGTCATGGAGTCCTGTGTCTT | |
| GCTCGCCATGTCCATTGATCGGGCACTGGCCATCTGCCGACCTCTCCACTACCCAGCGCTC | |
| CTCACCAATGGTGTAATTAGCAAAATCAGCCTGGCCATTTCTTTTCGATGCCTGGGTCTCC | |
| ATCTGCCCCTGCCATTCCTGCTGGCCTACATGCCCTACTGCCTCCCACAGGTCCTAACCCAT | |
| TCTTATTGCTTGCATGCAGATGTGGCTCGTTTGGCCTGCCCAGAAGCTTGGGGTGCAGCCT | |
| ACAGCCTATTTGTGGTTCTTTCAGCCATGGGTTTGGACCCCCTGCTTATTTTCTTCTGCTAT | |
| GGCCTGATTGGCAAGGTGTTGCAAGGTGTGGAGTCCAGAGAGGATCGCTGGAAGGCTGGT | |
| CAAACCTGTGCTGCCCACCTCTCTGCAGTGCTCCTCTTCTATATCCCTATGATCCTCCTGGC | |
| ACTGATTAACCATCCTGAGCTGCCAATCACTCAGCATACCCATACTCTTCTATCCTATGTCC | |
| ATTTCCTTCTTCCTCCATTGATAAACCCTATTCTCTATAGTGTCAAGATGAAGGAGATTAGA | |
| AAGAGAATACTCAACAGGTTGCAGCCCAGGAAGGTGGGTGGTGCTCAGTGA | |
| AOLFR185 sequences: | |
| MFYPILNDISTKNNSNIMSCCNILFIKTVEIILVYNQTQSPWYPIVPSKSLVYNNNTCFDCYHLQR | (SEQ ID NO: 341) |
| VDCVPSRDHINQSMVLASGNSSSHPVSFILLGIPGLESFQLWIAFPFCATYAVAVVGNITLLHVIR | |
| IDHTLHEPMYLFLAMLAITDLVLSSSTQPKMLAIFWFHAHEIQYHACLIQVFFIHAFSSVESGVL | |
| MAMALDCYVATCFPLRHSSILTPSVVIKLGTIVMLRGLLWVSPFCFMVSRMPFCQHQAIPQSYC | |
| EHMAVLKLVCADTSISRGYGLFVAFSVAGFDMIVIGMSYVMILRAVLQLPSGEARLKAFSTRA | |
| SHICVILALYIPALFSFLTYRFGHDVPRVVHILFANLYLLIPPMLNPIIYGVRTKQIGDRVIQGCCG | |
| NIP | |
| ATGTTCTACCCCATTTTGAATGACATAAGTACGAAAAACAACAGTAACATCATGTCATGTT | (SEQ ID NO: 342) |
| GTAACATATTATTTATTAAAACAGTTGAAATTATTCTAGTTTATAATCAAACCCAATCACC | |
| CTGGTATCCAATAGTCCCATCCAAAAGCCTTGTATATAATAATAACACTTGTTTTGATTGTT | |
| ATCATCTGCAGAGAGTAGATTGCGTTCCCAGCAGAGACCATATTAACCAGTCCATGGTGCT | |
| GGCTTCAGGGAACAGCTCTTCTCATCCTGTGTCCTTCATCCTGCTTGGAATCCCAGGCCTG | |
| GAGAGTTTCCAGTTGTGGATTGCCTTTCCGTTCTGTGCCACGTATGCTGTGGCTGTTGTTGG | |
| AAATATCACTCTCCTCCATGTAATCAGAATTGACCACACCCTGGATGAGCCCATGTACCTC | |
| TTTCTGGCCATGCTGGCCATCACTGACCTGGTCCTCTGCTCCTCCACTCAACCTAAGATGTT | |
| GGCCATATTCTGGTTTCATGCTCATGAGATTCAGTACCATGCCTGCCTCATCCAGGTGTTCT | |
| TCATCCATGCCTTTTCTTCTGTGGAGTCTGGGGTGCTCATGGCTATGGCCCTGGACTGCTAC | |
| GTGGCTACCTGCTTCCCACTCCGACACTCTAGCATCCTGACCCCATCGGTCGTGATCAAAC | |
| TGGGGACCATCGTGATGCTGAGAGGGCTGGTGTGGGTGAGCCCCTTCTGCTTCATGGTGTC | |
| TAGGATGCCCTTCTGCCAACACCAAGCCATTCCCCAGTCATACTGTGAGCACATGGCTGTG | |
| CTGAAGTTGGTGTGTGCTGATACAAGCATAAGTCGTGGGTATGGGCTCTTTGTGGCCTTCT | |
| CTGTGGCTGGCTTTGATATGATTGTCATTGGTATGTCATACGTGATGATTTTGAGAGCTGT | |
| GCTTCAGTTGCCCTCAGGTGAAGCCCGCCTCAAAGCTTTTAGCACACGTGCCTCCCATATC | |
| TGTGTCATCTTGGCTCTTTATATCCCAGCCCTTTTTTCTTTCCTCACCTACCGCTTTGGCCAT | |
| GATGTGCCCCGAGTTGTACACATCCTGTTTGCTAATCTCTATCTACTGATACCTCCCATGCT | |
| CAACCCCATCATTTATGGAGTTAGAACCAAACAGATCGGGGACAGGGTTATGCAAGGATG | |
| TTGTGGAAACATCCCCTGA | |
| AOLFR186 sequences: | |
| MSNASLVTAFILTGLPHAPGLDALLFGIFLVVYVLTVLGNLLILLVIRVDSHLHTPMYYFLTNLS | (SEQ ID NO: 343) |
| FIDMWFSTVTVPKMLMTLVSPSGRAISFHSCVAQLYFFHFLGSTECFLYTVMSYDRYLMSYPL | |
| RYTSMMSGSRCALLATGTWLSQSLHSAVQTILTFHLPYCGPNQIQHYFCDAPPILKIACADTSA | |
| NVMVIFVDIGIVASGCFVLIVLSYVSIVCSILPIRTSDGRRRAFQTCASHCIVVLCFFVPCVVIYLR | |
| PGSMDAMDGVVAIFYTVLTPLLNPVVYTLRNKEVKKAVLKLRDKVAHPQRK | |
| ATGTCCAACGCCAGCCTCGTGACAGCATTCATCCTGACAGGCCTTCCCCATGCCCCAGGGC | (SEQ ID NO: 344) |
| TGGACGCCCTCCTCTTTGGAATCTTCCTGGTGGTTTACGTGCTCACTGTGCTGGGGAACCT | |
| CCTCATCCTGCTGGTGATCAGGGTGGATTCTCACCTCCACACCCCCATGTACTACTTCCTCA | |
| CCAACCTGTCCTTCATTGACATGTGGTTCTCCACTGTCACGGTGCCCAAAATGCTGATGAC | |
| CTTGGTGTCCCCAAGCGGCAGGGCTATCTCCTTCCACAGCTGCGTGGCTCAGCTCTATTTTT | |
| TCCACTTCCTGGGGAGCACCGAGTGTTTCCTCTACACAGTCATGTCCTATGATCGCTACTTG | |
| GCCATCAGTTACCCGCTCAGGTACACCAGCATGATGAGTGGGAGCAGGTGTGCCCTCCTGG | |
| CCACCGGCACTTGGCTCAGTGGCTCTCTGCACTCTGCTGTCCAGACCATATTGACTTTCCAT | |
| TTGCCCTACTGTGGACCCAACCAGATCCAGCACTACTTCTGTGACGCACCGCCCATCCTGA | |
| AACTGGCCTGTGCAGACACCTCAGCCAACGTGATGGTCATCTTTGTGGACATTGGGATAGT | |
| GGCCTCAGGCTGCTTTGTCCTGATAGTGCTGTCCTATGTGTCCATCGTCTGTTCCATCCTGC | |
| GGATCCGCACCTCAGATGGGAGGCGCAGAGCCTTTCAGACCTGTGCCTCCCACTGTATTGT | |
| GGTCCTTTGCTTCTTTGTTCCCTGTGTTGTCATTTATCTGAGGCCAGGCTCCATGGATGCCA | |
| TGGATGGAGTTGTGGCCATTTTCTACACTGTGCTGACGCCCCTTCTCAACCCTGTTGTGTAC | |
| ACCCTGAGAAACAAGGAGGTGAAGAAAGCTGTGTTGAAACTTAGAGACAAAGTAGCACAT | |
| CCTCAGAGGAAATAA | |
| AOLFR187 sequences: | |
| MAQVRALHKIMALFSANSIGAMNNSDTRIAGCFLTGIPGLEQLHIWLSIPFCIMYIAALEGNGILI | (SEQ ID NO: 345) |
| CVILSQAILHEPMYIFLSMLASADVLLSTTTMPKALANLWLGYSHISFDGCLTQKFFIHFLFIHSA | |
| VLLAMAFDRYAICSPLRYVTILTSKVIGKIVTATLSRSFIIMFPSIFLLEHLHYCQINIAHTFCEH | |
| MGIAHLSCSDISINVWYGLAAALLSTGLDIMLITVSYIHILQAVFRILSQDARSKALSTCGSHICV | |
| ILLFYVPALFSVFAYRFGGRSIPCYVHILLASLYVVIPPMLNPVIYGVRTKPILEGAKQMFSNLAK | |
| GSK | |
| ATGGCACAGGTGAGGGCGCTGCATAAAATCATGGCCCTTTTTTCTGCTAACAGCATAGGTG | (SEQ ID NO: 346) |
| CTATGAACAACTCTGACACTCGCATAGCAGGCTGCTTCCTCACTGGCATCCCTGGGCTGGA | |
| GCAACTACATATCTGGCTGTCCATCCCCTTCTGCATCATGTACATCGCTGCCCTGGAAGGC | |
| AATGGCATCCTAATTTGTGTCATCCTCTCCCAGGCAATCCTGCATGAGCCCATGTACATAT | |
| TCTTATCTATGCTGGCCAGTGCTGATGTCTTGCTCTCTACCACCACCATGCCTAAGGCCCTG | |
| GCCAATTTGTGGCTAGGTTATAGCCACATTTCCTTTGATGGCTGCCTCACTCAAAAGTTCTT | |
| CATTCACTTCCTCTTCATTCACTCTGCTGTCCTGCTGGCCATGGCCTTTGACCGCTATGTGG | |
| CCATCTGCTCCCCCCTGCGATATGTCACAATCCTCACAAGCAAGGTCATTGGGAAGATCGT | |
| CACTGCCACCCTGAGCCGCAGCTTCATCATTATGTTTCCATCCATCTTTCTCCTTGAGCACC | |
| TGGACTATTGCCAGATCAACATCATTGCACACACATTTTGTGAGCACATGGGCATTGCCCA | |
| TCTGTCCTGTTCTGATATCTCCATCAATGTCTGGTATGGGTTGGCAGCTGCTCTTCTCTCCA | |
| CAGGCCTGGACATCATGCTTATTACTGTTTCCTACATCCACATCCTCCAAGCAGTCTTCCGC | |
| CTCCTTTCTCAAGATGCCCGCTCCAAGGCCCTGAGTACCTGTGGATCCCATATCTGTGTCAT | |
| CCTACTCTTCTATGTCCCTGCCCTTTTTTCTGTCTTTGCCTACAGGTTTGGTGGGAGAAGCA | |
| TCCCATGCTATGTCCATATTCTCCTGGCCAGCCTCTACGTTGTCATTCCTCCTATGCTCAAT | |
| CCCGTTATTTATGGAGTGAGGACTAAGCCAATACTGGAAGGGGCTAAGCAGATGTTTTCA | |
| AATCTTGCCAAAGGATCTAAATAA | |
| AOLFR188 sequences: | |
| MFPSLCPCVLLVQLPLMNENMQCFVFCSCDSLLRAMMVSRFIHVPFVKMRIIVGGYSKHFFSN | (SEQ ID NO: 347) |
| ELLCVRPWSGKTWSIRRHIFDMELLTNNLKFITDPFVCRIRHLSPTPSEEHMKNKNNVTEFILL | |
| GLTQNPEGQKVLFVTFLLIYMVTIMGNLLIIVTIMASQSLGSPMYFFLASLSFIDTVYSTAFAPK | |
| MIVDLLSEKKTISFQGCMAQLFMDHLFAGAEVILLVVMAYDRYMAICKPLHELITMNRRVCVL | |
| MLLAAWIGGFLHSLVQFLFIYQLPFCGPNVIDNFLCDLYPLLKLACTNTYVTGLSMIANGGAIC | |
| AVTFFTILLSYGVILHSLKTQSLEGKRKAFYTCASHVTVVILFFVPCIFLYARPNSTFPIDKSMTV | |
| VLTFITPMLNPLIYTLKNAEMKSAMRKLWSKKVSLAGKWLYHS | |
| ATGTTCCCCTCCCTGTGTCCATGTGTTCTCCTTGTTCAACTCCCACTTATGAATGAGAACAT | (SEQ ID NO: 348) |
| GCAGTGTTTTGTTTTCTGTTCTTGTGATAGTTTGCTGAGAATGATGGTTTCCCGCTTCATCC | |
| ATGTCCCATTTGTAAAAATGAAAAGGATAATTGTGGGAGGATATTCTAAACACTTGTTTTC | |
| TAATGAGGTGCTCTGTGTGAGGGCCTGGTCAGGGAAAACGTGGTCGATAAGGCATCACAT | |
| TTTTGACATGGAGCTTCTGACAAATAATCTCAAATTITATCACTGACCCTTTTGTTTGTAGGC | |
| TCCGACACCTGAGTCCAACACCTTCAGAAGAACACATGAAAAATAAGAACAATGTGACTG | |
| AATTTATCCTCTTAGGGCTCACACAGAACCCTGAGGGGCAAAAGGTTTTATTTGTCACATT | |
| CTTAGTAATCTACATGGTGACGATAATGGGCAACCTGCTTATCATAGTGACCATCATGGCC | |
| AGCCAGTCCCTGGGTTCCCCCATGTACTTTTTTCTGGCTTCTTTATCATTCATAGATACCGT | |
| CTATTCTACTGCATTTGCTCCCAAATGATTGTTGACTTGCTCTCTGAGAAAAAGACCATTT | |
| CCTTTCAGGGTTGTATGGCTCAACTTTTTATGGATCATTTATTTGCTGGTGCTGAAGTCATT | |
| CTTCTGGTGGTAATGGCCTATGATCGATACATGGCCATCTGTAAGCCTCTTCATGAATTGA | |
| TCACCATGAATCGTCGAGTCTGTGTTCTTATGCTGTTGGCGGCCTGGATTGGAGGCTTTCT | |
| TCACTCATTGGTTCAATTTCTCTTTATTTATCAGCTCCCTTTCTGTGGACCCAATGTCATTG | |
| ACAACTTCCTGTGTGATTTGTATCCCTTATTGAAACTTGCTTGCACCAATACCTATGTCACT | |
| GGGCTTTCTATGATAGCTAATGGAGGAGCGATTTGTGCTGTCACCTTCTTCACTATCCTGC | |
| TTTCCTATGGGGTCATATTACACTCTCTTAAGACTCAGAGTTTGGAAGGGAAACGAAAAGC | |
| TTTCTACACCTGTGCATCCCACGTCACTGTGGTCATTTTATTCTTTGTCCCCTGTATCTTCTT | |
| GTATGCAAGGCCCAATTCTACTTTTCCCATTGATAAATCCATGACTGTAGTTCTAACTTTTA | |
| TAACTCCCATGCTGAACCCACTAATCTATACCCTGAAGAATGCAGAAATGAAAGTGCCAT | |
| GAGGAAACTTTGGAGTAAAAAAGTAAGCTTAGCTGGGAAATGGCTGTATCACTCATGA | |
| AOLFR189 sequences: | |
| MQQNNSVPEFILLGLTQDPLRQKIVFVIFLIFYMGTVVGNMLIIVTIKSSRTLGSPMYFFLFYLSF | (SEQ ID NO: 349) |
| ADSCFSTSTAPRLIVDALSEKKIITYNECMTQVFALHLFGCMEIFVLILMAVDRYVAICKYLRYP | |
| TIMSQQVCIILIVLAWIGSLIHSTAQIILALRLPFCGPYLIDHYCCDLQPLLKIACMDTYMINLLL | |
| VSNSGAICSSSFMILIISYIVILHSLRNHSAKGKKKALSACTSHIIVVILFFGPCIFIYTRPPTTFPMD | |
| KMVAVFYTIGTPFLNPLIYTSEECRSEKCHEK | |
| ATGCAGCAAAATAACAGTGTGCCTGAATTCATACTGTTAGGATTAACACAGGATCCCTTGA | (SEQ ID NO: 350) |
| GGCAGAAAATAGTGTTTGTAATCTTCTTAATTTTCTATATGGGAACTGTGGTGGGGAATAT | |
| GCTCATTATTGTGACCATCAAGTCCAGCCGGACACTAGGAAGCCCCATGTACTTCTTTCTA | |
| TTTTATTTGTCCTTTGCAGATTCTTGCTTTTCAACTTCCACAGCCCCTAGATTAATTGTGGA | |
| TGCTCTCTCTGAAAAGAAAATTATAACCTACAATGAGTGCATGACACAAGTCTTTGCACTA | |
| CATTTATTTGGCTGCATGGAGATCTTTGTCCTCATTCTCATGGCTGTTGATCGCTATGTGGC | |
| CATCTGTAAGCCCTTGCGTTACCCAACCATCATGAGCCAGCAGGTCTGCATCATCCTGATT | |
| GTTCTTGCCTGGATAGGGTCTTTAATACACTCTACAGCTCAGATTATCCTGGCCTTAAGATT | |
| GCCTTTCTGTGGACCCTATTTGATTGATCATTATTGCTGTGATTTGCAGCCCTTGTTGAAAG | |
| TTGCCTGCATGGACACTTACATGATCAACCTGCTGTTGGTGTCTAACAGTGGGGCATTTG | |
| CTCAAGTAGTTTCATGATTTTGATAATTTCATATATTGTCATCTTGCATTCACTGAGAAACC | |
| ACAGTGCCAAAGGGAAGAAAAAGGCTCTCTCCGCTTGCACGTCTCACATAATTGTAGTCAT | |
| CTTATTCTTTGGCCCATGTATATTCATATATACACGCCCCCCGACCACTTTCCCGATGGACA | |
| AGATGGTGGCAGTATTTTATACTATTGGAACACCCTTTCTCAATCCACTCATCTACACATCT | |
| GAGGAATGCAGAAGTGAAAAATGCCATGAGAAAG | |
| AOLFR190 sequences: | |
| MQRSNHTVTEFILLGFTTDPGMQLGLFVVFLGVYCLTVVGSSTLIVLICNDSRIHTPMYFVIGN | (SEQ ID NO: 351) |
| LSFLDLWYSSVHTPKILVTCISEDKSISFAGCLCQFFSARLAYSECYLLAAMAYDHYVAISKPLL | |
| YAQTMPRRLCICLVLYSYTGGFVNAIILTSNTFTLDFCGDNVIDDFFCDVPPLVKIACSVRESYQ | |
| AVLHFLLASNVISPTVLILASYLSIITTILRIHSTQGRIKVFSTCSSHLISVTLYYGSILYNYSRPSSS | |
| YSLKRDKMVSTFYTMLFPMLNPMIYSLRSKDMKDALKKFFKSA | |
| ATGCAGAGGAGCAATCACACAGTGACTGAGTTCATCCTGCTGGGCTTCAGCACAGATCCAG | (SEQ ID NO: 352) |
| GGATGCAACTGGGCCTCTTTGTGGTGTTCCTGGGTGTGTACTGTCTGACTGTGGTAGGAAG | |
| TAGCACCCTCATCGTGTTGATCTGTAATGACTCCCGCCTACACACACCCATGTATTTTGTCA | |
| TTGGAAATCTGTCATTTCTGGATCTCTGGTATTCTTCTGTCCACACCCCAAAGATCCTAGTG | |
| ACCTGCATCTCTGAAGACAAAAGCATGTCCTTTGCTGGCTGCCTGTGTCAGTTCTTCTCTGC | |
| CAGGCTGGCCTATAGTGAGTGCTACCTACTGGCTGCCATGGCTTATGACCACTACGTGGCC | |
| ATCTGCAAGCCCCTGCTTTATGCTCAGACCATGCCAAGGAGATTGTGCATCTGTTTGGTTTT | |
| ATATTCCTATACTGGGGGTTTTGTCAATGCAATAATATTAAGCAGCAACACATTCACATTG | |
| GATTTTTGTGGTGACAATGTCATTGATGACTTTTTCTGTGATGTTCCACCCCTCGTGAAGCT | |
| GGCATGCAGTGTGAGAGAGAGCTACCAGGCTGTGCTGCACTTCCTTCTGGCCTCCAATGTC | |
| ATCTCCCCTACTGTGCTCATCCTTGCCTCTTACCTCTCCATCATCACCACCATCCTGAGGAT | |
| CCACTCTACCGAGGGCGGCATCAAAGTGTTCTCCACATGCTCCTCCCACCTGATGTCCGTTA | |
| CCTTATACTATGGCTCCATTCTCTACAACTACTCCCGGCCAAGTTCCAGGTACTCCCTCAAG | |
| AGGGACAAAATGGTTTCTACCTTTTATACTATGCTGTTCCCCATGTTGAATCCCATGATCTA | |
| CAGTGTGAGGAGTAAAGACATGAAAGACGCTCTGAAAAAATTCTTCAAGTCAGCATAA | |
| AOLFR191 sequences: | |
| MTGGGNITEITYFILLGFSDFPRIIKVLFTIFLVIYITSLAWNLSLIVLIRMDSHLHTPMYFFLSNLS | (SEQ ID NO: 353) |
| FIDVCYISSTVPKMLSNLLQEQQTITFVGCIIQYFIFSTMGLSESCLMTAMAYDRYAAICNPLLYS | |
| SIMSPTLCVWMVLGAYMTGLTASLFQIGALLQLHFCGSNVIRHFFCDMPQLLILSCTDTFFVQV | |
| MTAILTMFFGIASALVIMISYGYIGISIMKITSAKGSPKAFNTCASHLTAVSLFYTSGIFVYLRSSS | |
| GGSSSFDRFASVFYTVVIPMLNPLIYSLRNKEIKDALKPLQKYYCC | |
| ATGACTGGGGGAGGAAATATTACAGAAATCACCTATTTCATCCTGCTGGGATTCTCAGATT | (SEQ ID NO: 354) |
| TTCCCAGGATCATAAAAGTGCTCTTCACTATATTCCTGGTGATCTACATTACATCTCTGGCC | |
| TGGAACCTCTCCCTCATTGTTTTAATAAGGATGGATTCCCACCTCCATACACCCATGTATTT | |
| CTTCCTCAGTAACCTGTCCTTCATAGATGTCTGCTATATCAGCTCCACAGTCCCCAAGATGC | |
| TCTCCAACCTCTTACAGGAACAGCAAACTATCACTTTTGTTGGTTGTATTATTCAGTACTTT | |
| ATCTTTTCAACGATGGGACTGAGTGAGTCTTGTCTCATGACAGCCATGGCTTATGATCGTT | |
| ATGCTGCCATTTGTAACCCCCTGCTCTATTCATCCATCATGTCACCCACCCTCTGTGTTTGG | |
| ATGGTACTGGGAGCCTACATGACTGGCCTCACTGCTTCTTTATTCCAAATTGGTGCTTTGCT | |
| TCAACTCCACTTCTGTGGGTCTAATGTCATCAGACATTTCTTCTGTGACATGCCCCAACTGT | |
| TAATCTTGTCCTGTACTGACACTTTCTTTGTACAGGTCATGACTGCTATATTAACCATGTTC | |
| TTTGGGATAGCAAGTGCCCTAGTTATCATGATATCCTATGGCTATATTGGCATCTCCATCA | |
| TGAAGATCACTTCAGCTAAAGGCAGTCCAAGGCATTCAACACCTGTGCTTCTCATCTAAC | |
| AGCTGTTTCCCTCTTCTATACATCAGGAATCTTTGTCTATTTGAGGTCCAGCTCTGGAGGTT | |
| CTTCAAGCTTTGACAGATTTGCATCTGTTTTCTACACTGTGGTCATTCCCATGTTAAATCCC | |
| TTGATTTACAGTTTGAGGAACAAAGAAATTAAAGATGCCTTAAAGAGGTTGCAAAAGAGA | |
| AAGTGCTGCTGA | |
| AOLFR192 sequences: | |
| MENNTEVTEFILVGLTDDPELQIPLFIVFLFIYLITLVGNLGMIELILLDSCLHTPMYFFLSNLSLV | (SEQ ID NO: 355) |
| DFGYSSAVTPKVMVGFLTGDKFILYNACATQFFFFVAYITAESFLLASMAYDRYAALCYYLHY | |
| TTTMTTNVCACLAIGSYICGFLNASIHTGNTRLSFCRSNVVEHFFCDAPPLLTLSCSDNYISEM | |
| VIFFVVGFNDLFSILVILISYLFIFITIMKMRSPEGRQKAFSTGASHLTAVSIFYGTGIFMYLRPNSS | |
| HFMGTDKMASVFYAIVIPMLNPLVYSLRNKEVKSAFKKTVGKAKASIGFIF | |
| ATGGAGAACAACACAGAGGTGACTGAATTCATCCTTGTGGGGTTAACTGATGACCCAGAA | (SEQ ID NO: 356) |
| CTGCAGATCCCACTCTTCATAGTCTTCGTTTTCATCTACGTCATCACTCTGGTTGGGAACCT | |
| GGGGATGATTGAATTGATTCTAGTGGACTCCTGTCTCCACACCCCCATGTACTTCTTCCTCA | |
| GTAACCTCTCCCTGGTGGACTTTGGTTATTCCTCAGCTGTCACTCCCAAGGTGATGGTGGG | |
| GTTTCTCACAGGAGACAATTCATATTATATAATGCTTGTGCCACACAATTCTTCTTCTTTG | |
| TAGCCTTTATCACTGCAGAAAGTTTCCTCCTGGCATCAATGGCCTATGACCGCTATGCAGC | |
| ATTGTGTAAACCCCTGCATTACACCACCACCATGACAACAAATGTATGTGCTTGCCTGGCC | |
| ATAGGCTCCTACATCTGTGGTTTCCTGAATGCATCCATTCATACTGGGAACACTTTCAGGC | |
| TCTCCTTCTGTAGATCGAATGTAGTTGAACACTTTTTCTGTGATGCTCCTCCTCTCTTGACT | |
| CTCTCATGTTCAGACAACTACATCAGTGAGATGGTTATTTTTTTTGTGGTGGGATTCAATG | |
| ACCTCTTTTCTATCCTGGTAATCTTGATCTCCTACTTATTTATATTTATCACCATCATGAAG | |
| ATGCGCTCACCTGAAGGACGCCAGAAGGCCTTTTCTACTTGTGCTTGCCACCTTACTGCAG | |
| TTTCCATCTTTTATGGGACAGGAATCTTTATGTACTTACGACCTAACTCCAGCCATTTCATG | |
| GGCACAGACAAAATGGCATCTGTGTTCTATGCCATAGTCATTCCCATGTTGAATCCACTGG | |
| TCTACAGCCTGAGGAACAAAGAGGTTAAGAGTGCCTTTAAAAAGACTGTAGGGAAGGCAA | |
| AGGCCTCTATAGGATTCATATTTTAA | |
| AOLFR193 sequences: | |
| MENKTEVTQFILLGLTNDSELQVPLFITFPFIYIITLVGNLGIIVLIFWDSCLHNPMYFFLSNLSLV | (SEQ ID NO: 357) |
| DFCYSSAVTPIVMAGFLIEDKVISYNACAAQMYIFVAFATVENYLLASMAYDRYAAVCKPLHY | |
| TTTMTTTVCARIAIGSYLCGFLNASIHTGDTFSLSFCKSNEVHHFFCDIPAVMVLSCSDRHISEL | |
| VLIYVVSFNIFIALLVILISYTFIFITILKMHSASVYQKPLSTCASHFIAVGIFYGTIIFMYLQPSSSH | |
| SMDTDKMAPVFYTMVIPMLNPLVYSLRNKEVKSAFKKVVEKAKLSVGWSV | |
| ATGGAAAATAAGACAGAAGTAACACAATTCATTCTTCTAGGACTAACCAATGACTCAGAA | |
| CTGCAGGTTCCCCTCTTTATAACGTTCCCCTTCATCTATATTATCACTCTGGTTGGAAACCT | (SEQ ID NO: 358) |
| GGGAATTATTGTATTGATATTCTGGGATTCCTGTCTCCACAATCCCATGTACTTTTTTCTCA | |
| GTAACTTGTCTCTAGTGGACTTTTGCTACTCTTCAGCTGTCACTCCCATCGTCATGGCTGGA | |
| TTCCTTATAGAAGACAAGGTCATCTCTTACAATGCATGTGCTGCTCAAATGTATATCTTTGT | |
| AGCTTTTGCCACTGTGGAAAATTACCTCTTGGCCTCAATGGCCTATGACCGCTATGCAGCA | |
| GTGTGCAAACCCCTACATTACACCACAACCATGACAACAACTGTGTGTGCTCGTCTGGCCA | |
| TAGGCTCCTACCTCTGTGGTTTCCTGAATGCCTCCATCCACACTGGGGACACATTTAGTCTC | |
| TCTTTCTGTAAGTCCAATGAAGTCCATCACTTTTTCTGTGATATTCCAGCAGTCATGGTTCT | |
| CTCTTGCTCTGATAGACATATTAGCGAGCTTGTTCTTATTTATGTTGTGAGCTTCAATATCT | |
| TTATAGCTCTCCTGGTTATCTTGATATCCTACACATTCATTTTTATCACCATCCTAAAGATG | |
| CACTCAGCTTCAGTATACCAGAAGCGTTTGTCCACCTGTGCCTCTCATTTCATTGCAGTCGG | |
| CATCTTCTATGGGACTATTATCTTCATGTACTTACAACCCAGCTCCAGTCACTCCATGGACA | |
| CAGACAAAATGGCACCTGTGTTCTATACAATGGTCATCCCCATGCTGAACCCTCTGGTCTA | |
| TAGTCTGAGGAACAAGGAAGTGAAGAGTGCATTCAAGAAAGTTGTTGAGAAGGCAAAATT | |
| GTCTGTAGGATGGTCAGTTTAA | |
| AOLFR194 sequences: | |
| MERQNQSGVVEFILLGFSNYPELQGQLFVAFLVIYLVTLIGNAIIIVIVSLDQSLHVPMYLELLNL | (SEQ ID NO: 359) |
| SVVDLSFSAVIMPEMLVVLSTEKTTISFGGCFAQMYFILLFGGAECFLLGAMAYDRFAAICHPL | |
| NYQMIMNKGVFMKLIIFSWALGFMLGTVQTSWVSSFPFCGLNEINHISCETPAVLELACADTFL | |
| FEIYAFTGTFLHLVPFLLILLSYIRVLFAILKMPSTTGRQKAYSTCAAHLTSVTLFYGTASMTYLQ | |
| PKSGYSPETKKVMSLSYSLLTPLLNLLIYSLRNSEMKRALMKLWRRRVVLHTI | |
| ATGGAAAGACAAAATCAAAGCTGTGTGGTTGAATTCATCCTCTTGGGCTTTTCTAACTATC | (SEQ ID NO: 360) |
| CTGAGCTCCAGGGGCAGCTCTTTGTGGCTTTCCTGGTTATTTATCTGGTGACCCTGATAGG | |
| AAATGCCATTATTATAGTCATCGTCTCCCTAGACCAGAGCCTCCACGTTCCCATGTACCTGT | |
| TTCTCCTGAACTTATCTGTGGTGGAGCTGAGTTTCAGTGCAGTTATTATGCCTGAAATGCT | |
| GGTGGTCGTCTCTACTGAAAAAACTACAATTTCTTTTGGGGGCTGTTTTGCACAGATGTAT | |
| TTCATCCTTCTTTTTGGTGGGGCTGAATGTTTTCTTCTGGGAGCAATGGCTTATGACCGATT | |
| TGCTGCAATTTGCCATCCTCTCAACTAGCAAATGATTATGAATAAAGGAGTTTTTATGAAA | |
| TTAATTATATTITTCATGGGCCTTAGGTTTTATGTTAGGTACTGTTCAAACATCATGGGTATC | |
| TAGTTTTCCCTTTTGTGGCCTTAATGAAATTAACCATATATCTTGTGAAACCCCAGCAGTGT | |
| TAGAACTTGCATGTGCAGAGACGTTTTTGTTTGAAATCTATGCATTCACAGGCACCTTTTTG | |
| ATTATTTTGGTTCCTTTCTTGTTGATACTCTTGTCTTACATTCGAGTTGTGTTTGCCATCCTG | |
| AAGATGCCATCAACCACTGGGAGACAAAAGGCCTTTTCCACCTGTGCCGCTCACCTCACAT | |
| CTGTGACCCTATTCTATGGCACAGCCAGTATGACTTATTTACAACCCAAATCTGGCTACTC | |
| ACCGGAAACCAAGAAAGTGATGTCATTGTCTTACTCACTTCTGACACCACTGCTGAATCTG | |
| CTTATCTACAGTTTGCGAAATAGTGAGATGAAGAGGGCTTTGATGAAATTATGGCGAAGG | |
| CGAGTGGTTTTACACACAATCTGA | |
| AOLFR195 sequences: | |
| MIVQLICTVCFLAVNTFHVRSSFDFLKADDMGEINQTLVSEFLLLGLSGYPKIEIVYFALILVMY | (SEQ ID NO: 361) |
| LVILIGNGVLIIASIFDSHFHTPMYFFLGNLSFLDICYTSSSVPSTLVSLISKKRNISFSGCAVQMFF | |
| GFAMGSTECLLLGMMAFDRYVAICNPLRYPIILSKVAYVLMASVSWLSGGINSAVQTLLAMRL | |
| PFCGNNIINHFACEILAVLKLACADISLNIITMVISNMAFLVLPLMVIFFSYMFILYTILQMNSATG | |
| RRKAFSTCSAHLTVVIIFYGTIFFMYAKPKSQDLIGEEKLQALDKLISLFYGVVTPMLNPILYSLR | |
| NKDVKAAVKYLLNKKPIH | |
| ATGATTGTTCAGTTAATTTGTACTGTTTGTTTCTTGGCAGTAAATACATTTCATGTTAGATC | (SEQ ID NO: 362) |
| TTCTTTTGATTTCCTGAAAGCAGATGACATGGGTGAGATTAAGCAGACACTTGTGTGAGAA | |
| TTTCTTCTTGTGGGTCTTTCTGGATACCCAAAGATTGAGATTGTTTACTTTGCTCTCATTCT | |
| AGTTATGTACCTAGTGATTCTAATTGGCAATGGTGTTCTAATCATAGCCAGCATCTTTGATT | |
| CTCATTTTCACACACCAATGTACTTCTTCCTGGGCAACCTCTCTTTCCTGGATATCTGCTAT | |
| ACATCCTCCTCTGTTCCCTCAACATTGGTGAGCTTAATCTCAAAGAAAAGAAACATTTCCT | |
| TCTCTGGATGTGCAGTGCAGATGTTCTTTGGGTTTGCAATGGGGTCAACAGAATGTCTGCT | |
| TCTTGGCATGATGGCATTTGATCGTTATGTGGCCATCTGCAACCCACTGAGATACCCCATC | |
| ATCCTGAGCAAGGTGGCGTATGTATTGATGGCTTCTGTGTCCTGGCTGTCCGGTGGAATAA | |
| ATTCAGCTGTGCAAACATTACTTGCCATGAGACTGCCTTTCTGTGGGAATAATATTATCAA | |
| TCATTTCGCATGTGAAATATTAGCTGTCCTCAAGCTGGCCTGTGCTGATATATCCCTCAATA | |
| TTATCACCATGGTGATATCAAATATGGCCTTCCTGGTTCTTCCACTGATGGTCATTTTTTTC | |
| TCCTATATGTTCATCCTCTACACCATCTTGCAAATGAATTCAGCCACAGGAAGACGCAAGG | |
| CATTTTCCACGTGCTCAGCTCACCTGACTGTGGTGATCATATTTTACGGTACCATCTTCTTT | |
| ATGTATGCGAAACCGAAGTCTCAAGACCTGATTGGGGAAGAAAAATTGCAAGCATTAGAC | |
| AAGCTCATTTCTCTGTTTTATGGGGTAGTGACACCCATGCTGAATCCTATACTCTATAGCTT | |
| GAGAAATAAGGATGTAAAAGCTGCTGTAAAATATTTGCTGAACAAAAAACCAATTCACTA | |
| A | |
| AOLFR196 sequences: | |
| MLESNYTMPTEFLFVGFTDYLPLRVTLFLVFLLVYTLTMVGNILLIILVNINSSLQIPMYYFLSNL | (SEQ ID NO: 363) |
| SFLDISCSTAITPKMLANFLASRKSISPYGCALQMFFFASFADAECLILAAMAYDRYAAICNPLL | |
| YTTLMSRRVCVCFIVLAYFSGSTTSLVHVCLTFRLSFCGSNIVNHFFCDIPPLLALSCTDTQINQL | |
| LLFALCSFIQTSTFVVIFISYFCILITVLSIKSSGGRSKTFSTCASHLIAVTLFYGALLFMYLQPTTS | |
| YSLDTDKVVAVFYTVVFPMFNPIIYSFRNKDVKNALKKLLERIGYSNEWYLNRLRIVNI | |
| ATGTTGGAGAGTAATTACACCATGCCAACTGAGTTCCTATTTGTTGGATTCACAGATTATC | (SEQ ID NO: 364) |
| TACCTCTCAGAGTCACACTGTTCTTGGTATTCCTTCTGGTATATACATTAACTATGGTCGGA | |
| AATATACTCTTAATAATTCTAGTTAATATTAATTCAAGCCTTCAAATTCCCATGTATTATTT | |
| TCTTAGCAACTTATCTTTCTTAGACATCAGCTGTTGTACAGCAATCACTCCTAAAATGCTGG | |
| CAAACTTCTTGGCATCCAGGAAAAGCATCTCTCCTTATGGGTGTGCACTACAAATGTTTTT | |
| CTTCGCTTCTTTTGCTGATGCTGAGTGCCTTATCCTGGCAGCAATGGCTTATGACCGCTATG | |
| CAGCCATCTGCAACCCACTGCTCTATACTACACTGATGTGTAGGAGAGTCTGTGTCTGCTT | |
| CATTGTGTTGGCATATTTCAGTGGAAGTACAACATCACTGGTCCATGTGTGCCTCACATTC | |
| AGGCTGTCATTTTGTGGCTCCAATATCGTGAATCATTTTTTCTGTGATATCCCACCTCTTCT | |
| GGCTTTATCATGTACAGACACTCAGATCAACCAGCTTCTGCTCTTTGCTTTGTGCAGCTTCA | |
| TCCAGACCAGCACTTTTGTGGTAATATTTATTTCTTACTTCTGCATCCTCATCACTGTGTTG | |
| AGCATCAAGTCCTCAGGTGGCAGAAGCAAAACATTCTCCACTTGTGCTTCCCACCTCATAG | |
| CAGTCACCTTATTCTATGGAGCGCTCCTGTTTATGTACTTACAGCCCACCACTAGCTATTCC | |
| CTAGACACTGATAAGGTGGTGGCAGTGTTTTATACTGTTGTATTTCCCATGTTTAATCCAA | |
| TAATTTATAGTTTCAGAAACAAGGATGTGAAAAATGCTCTCAAAAAGCTATTAGAAAGAA | |
| TTGGATATTCAAATGAATGGTATTTAAATCGTTTAAGAATAGTCAATATCTAA | |
| AOLFR197 sequences: | |
| MCYLSQLCLSLGEHTLHMGMVRHTNESNLAGFILLGFSDYPQLQKVLFVLILILYLLTILGNTTI | (SEQ ID NO: 365) |
| ILVSRLEPKIHMPMYFFLSHLSFLYRCFTSSVIPQLLVNLWEPMKTIAYGGCLVHLYNSHALGS | |
| TECVLLALMSCDRYVAVCRYLHYTVLMHIHLCMALASMAWLSGIATTLVQSTLTLQLPFCGH | |
| RQVDHFICEVPVLIKLACVGTTFNEAELFVASILFLIVPVSFILVSSGYIAHAVLRIKSATRRQKAF | |
| GTCFSHLTVVTIFYGTIIFMYLQPAKSRSRDQGKFVSLFYTVVTRMLNPLIYTLRIKEVKGALKK | |
| VLAKALGVNIL | |
| ATGTGTTATCTTTCTCAGCTATGCCTCAGCCTTGGGGAACACACTTTACATATGGGGATGG | (SEQ ID NO: 366) |
| TGAGACATACCAATGAGAGCAACCTAGCAGGTTTCATCCTTTTAGGGTTTTCTGATTATCC | |
| TCAGTTACAGAAGGTTCTATTTGTGCTCATATTGATTCTGTATTTACTAACTATTTTGGGGA | |
| ATACCACCATCATTCTGGTTTCTCGTCTGGAACCCAAGCTTCATATGCCGATGTATTTCTTC | |
| CTTTCTCATCTCTCCTTCCTGTACCGCTGCTTCACCAGCAGTGTTATTCCCCAGCTCCTGGT | |
| AAACCTGTGGGAACCCATGAAAACTATCGCCTATGGTGGCTGTTTGGTTCACCTTTACAAC | |
| TCCCATGCCCTGGGATCCACTGAGTGCGTCCTCTTGGCTCTGATGTCCTGTGAGCGCTATGT | |
| GGCTGTCTGCCGTCCTCTCCATTACACTGTCTTAATGCATATCCATCTCTGCATGGCCTTGG | |
| CATCTATGGCATGGCTCAGTGGAATAGCCACCACCCTGGTACAGTCCACCCTCACCCTGCA | |
| GCTGCCCTTCTGTGGGCATCGCCAAGTGGATCATTTCATCTGCGAGGTCCCTGTGCTCATC | |
| AAGCTGGCTTGTGTGGGCACCACGTTTAACGAGGCTGAGCTTTTTGTGGCTAGTATCCTTT | |
| TCCTTATAGTGCCTGTCTCATTCATCCTGGTCTCCTCTGGCTACATTGCCCACGCAGTGTTG | |
| AGGATTAAGTCAGCTACCAGGAGACAGAAAGCATTCGGGACCTGCTTCTCCCACCTGACA | |
| GTGGTCACCATCTTTTATGGAACCATCATCTTCATGTATCTGCAGCCAGCCAAGAGTAGAT | |
| CCAGGGACCAGGGCAAGTTTGTTTCTCTCTTCTACACTGTGGTAACCCGCATGCTTAACCC | |
| TCTTATTTATACCTTGAGGATCAAGGAGGTGAAAGGGGCATTAAAGAAAGTTCTAGCAAA | |
| GGCTCTGGGAGTAAATATTTTATGA | |
| AOLFR198 sequences: | |
| MENCTEVTKFILLGLTSVPELQIPLFILFTFIYLLTLCGNLGMMLLILMDSCLHTPMYFFLSNLSL | (SEQ ID NO: 367) |
| VDFGYSSAVTPKVMAGFLRGDKVISYNACAVQMFFFVALATVENYLLASMAYDRYAAVCKP | |
| LHYTTTMTASVGACLALGSYVCGFLNASFHIGGIFSLSFCKSNLVHHFFCDVPAVMALSCSDKH | |
| TSEVILVFMSSFNIFFVLLVIFISYLFIFITILKMHSAKGHQKALSTCASHFTAVSVFYGTVIFIYLQ | |
| PSSSHSMDTDKMASVFYAMIIPMLNPVVYSLRNREVQNAFKKVLRRQKFL | |
| ATGGAGAATTGTACGGAAGTGACAAAGTTCATTCTTCTAGGACTAACCAGTGTCCCAGAAC | (SEQ ID NO: 368) |
| TACAGATCCCCCTCTTTATCTTGTTCACCTTCATCTACCTCCTCACTCTGTGTGGGAACCTG | |
| GGGATGATGTTGCTGATCCTGATGGACTCTTGTCTCCACACCCCCATGTACTTTTTCCTCAG | |
| TAACCTGTCTCTGGTGGACTTTGGATACTCCTCAGCTGTCACTCCCAAGGTCATGGCTGGG | |
| TTCCTTAGAGGAGACAAGGTCATCTCCTACAATGCATGTGCTGTTCAGATGTTCTTCTTTGT | |
| AGCCTTGGGCACGGTGGAAAATTACTTGTTGGCCTCAATGGCCTATGAGCGCTATGCAGCA | |
| GTGTGCAAACCCCTACACTACACCACCACCATGACGGCCAGTGTAGGTGCCTGTCTGGCCC | |
| TAGGCTGATATGTCTGTGGCTTCCTAAATGCCTCATTCCACATTGGGGGCATATTCAGTCTC | |
| TCTTTCTGTAAATCCAATCTGGTACATCACTTTTTCTGTGATGTTCCAGCAGTCATGGCTCT | |
| GTCTTGCTCTGATAAACACACTAGTGAGGTGATTCTGGTTTTTATGTCAAGCTTTAATATCT | |
| TTTTTGTTCTTCTAGTTATCTTTATCTCCTACTTGTTCATATTCATCACCATCTTGAAGATGC | |
| ATTCAGCTAAGGGACACCAAAAAGCATTGTCCACCTGTGCCTCTCACTTCACTGCAGTCTC | |
| CGTCTTCTATGGGACAGTAATCTTCATCTACTTGCAGCCCAGCTCCAGCCACTCCATGGAC | |
| ACAGACAAAATGGCATGTGTGTTGTATGCTATGATCATGCCCATGCTGAACCCTGTGGTCT | |
| ACAGCCTGAGGAACAGAGAAGTCCAGAATGCATTCAAGAAAGTGTTGAGAAGGCAAAAAT | |
| TTCTATAA | |
| AOLFR199 sequences: | |
| MDTGNKTLPQDFLLLGFPGSQTLQLSLFMLFLVMYILTVSGNVAILMLVSTSHQLHTPMYFFLS | (SEQ ID NO: 369) |
| NLSFLEIWYTTAAVPKALAILLGRSQTISFTSCLLQMYFVFSLGCTEYFLLAAMAYDRCLAICYP | |
| LHYGAIMSSLLSAQLALGSWVCGFVAIAVPTALISGLSFCGPRAINHFFCDIAPWIALACTNTQA | |
| VELVAFVIAVVVILSSCLITFVSYVYIISTILRIPSASGRSKAFSTCSSHLTVVLIWYGSTVFLHVR | |
| TSIKDALDLIKAVHVLNTVVTPVLNPFIYTLRNKEVRETLLKKWKGK | |
| ATGGACACAGGCAACAAAACTCTGCCCCAGGACTTTCTCTTACTGGGCTTTCCTGGTTCTC | (SEQ ID NO: 370) |
| AAACTCTTCAGCTCTCTCTCTTTATGCTTTTTCTGGTGATGTACATCCTCACAGTTAGTGGT | |
| AATGTGGCTATCTTGATGTTGGTGAGCACCTCCCATCAGTTGCATACGCCCATGTACTTCTT | |
| TCTGAGCAACCTCTCCTTCCTGGAGATTTGGTATACCACAGCAGCAGTGCCCAAAGCACTG | |
| GCCATCCTACTGGGGAGAAGTCAGACCATATCATTTACAAGCTGTCTTTTGCAGATGTACT | |
| TTGTTTTCTCATTAGGCTGCACAGAGTACTTCCTCCTGGCAGCGATGGCTTATGACCGCTGT | |
| CTTGCCATCTGGTATCCTTTACAGTACGGAGCCATCATGAGTAGCCTGCTCTCAGCGCAGC | |
| TGGCCCTGGGCTCCTGGGTGTGTGGTTTCGTGGCCATTGCAGTGCCCACAGCCCTCATCAG | |
| TGGCCTGTCCTTCTGTGGCCCCCGTGCCATCAACCACTTCTTCTGTGACATTGCACCCTGGA | |
| TTGCCCTGGCCTGCACCAACACACAGGCAGTAGAGCTTGTGGCCTTTGTGATTGCTGTTGT | |
| GGTTATCCTGAGTTCATGCCTCATCACCTTTGTCTCCTATGTGTACATCATCAGCACCATCC | |
| TCAGGATCCCCTCTGCCAGTGGCCGGAGCAAAGCCTTCTCCACGTGCTCCTCGCATCTCAC | |
| CGTGGTGCTCATTTGGTATGGGTCCACAGTTTTCCTTCACGTCCGCACCTCTATCAAAGAT | |
| GCCTTGGATCTGATCAAAGCTGTCCACGTCCTGAACACTGTGGTGACTCCAGTTTTAAAGC | |
| CCTTCATCTATACGCTTCGTAATAAGGAAGTAAGAGAGACTCTGCTGAAGAAATGGAAGG | |
| GAAAATAA | |
| AOLFR200 sequences: | |
| MTRKNYTSLTEFVLLGLADTLELQIILFLFFLVIYTLTVLGNLGMILLIRIDSQLHTPMYFFLANL | (SEQ ID NO: 371) |
| SFVDVCNSTTITPKMLADLLSEKKTISFAGCFLQMYFFISLATTECILFGLMAYDRYAAICRPLL | |
| YSLIMSRTVYLK1MAAGAFAAGLLNFMVNTSHVSSLSFCDSNVIHHFFCDSPPLFKLSCSDTILKE | |
| SISSILAGVNIVGTLLVILSSYSYVLFSIFSMHSGEGRHRAFSTCASHLTAIILFYATCIYTYLRPSS | |
| SYSLNQDKVASVFYTVVIPMLNPLIYSLRSKEVKKALANVISRKRTSSFL | |
| ATGACCAGAAAAAATTATACCTCACTGACTGAGTTCGTCCTATTGGGATTAGCAGACACGC | (SEQ ID NO: 372) |
| TGGAGCTACAGATTATCCTCTTTTTGTTTTTTCTTGTGATTTATACACTTACAGTACTGGGA | |
| AATCTCGGGATGATCCTCTTAATCAGGATCGATTCCCAGCTTCACACACCCATGTATTTCTT | |
| CCTGGCTAACCTGTCCTTTGTGGACGTTTGTAACTCAACTACCATCACCCCAAAGATGCTG | |
| GCAGATTTATTATCAGAGAAGAAAACCATCTCTTTTGCTGGGTGCTTCCTACAGATGTACT | |
| TCTTTATCTCCCTGGCGACAACGGAATGCATCCTCTTTGGGTTAATGGCCTATGACAGGTA | |
| TGCGGCCATATGTCGCCCGCTGCTTTACTCCTTGATCATGTCCAGGACCGTCTACCTAAAA | |
| ATGGCAGCCGGGGCTTTTGCTGCAGGGTTGCTGAACTTCATGGTCAACACAAGCCATGTCA | |
| GCAGCTTGTCATTCTGTGACTCCAATGTCATCCATCACTTCTTCTGTGACAGTCCCCCACTT | |
| TTCAAGCTCTCTTGTTCTGACACAATCCTGAAAGAAAGCATAAGTTCTATTTTGGCTGGTG | |
| TGAATATTGTGGGGACTCTGCTTGTCATCCTCTCCTCCTACTCCTACGTTCTCTTCTCCATT | |
| TTTTCTATGCATTCGGGGGAGGGGAGGCACAGAGCTTTCTCCACGTGTGCCTCTCACCTGA | |
| CAGCCATAATTCTGTTCTATGCCACCTGCATCTATACTTACCTGAGACCTAGTTCCAGCTAC | |
| TCCCTGAATCAGGACAAAGTGGCTTCTGTGTTCTACACAGTGGTGATTCCCATGTTGAATC | |
| CTCTGATCTACAGCCTCAGGAGTAAGGAAGTAAAGAAGGCTTTAGCGAATGTAATTAGCA | |
| GGAAAAGGACCTCTTCCTTTCTGTGA | |
| AOLFR201 sequences: | |
| MEWENHTILVEFFLKGLSGHPRLELLFFVLIFIMYVVILLGNGTLILISILDPHLHTPMYFFLGNL | (SEQ ID NO: 373) |
| SFLDICYTTTSIPSTLVSFLSERXTISLSGCAVQMFLGLAMGTTECVLLGMMAFDRYVAICNPLR | |
| YPIIMSKDAYVPMAAGSWIIGAVNSAVQSVFVVQLPFCRNNIINHFTCEILAVMKLACADISDN | |
| EFIMLVATTLFILTPLLLIIVSYTLIIVSIFKISSSEGRSKASSTCSAHLTVVIIFYGTILFMYMPKS | |
| KETLNSDDLDATDKIISMFYGVMTPMMNPLIYSLRNKDVKEAVKHLLNRRFFSK | |
| ATGGAATGGGAAAACCACACGATTCTGGTGGAATTTTTTCTGAAGGGACTTTCTGGTCACC | (SEQ ID NO: 374) |
| CAAGACTTGAGTTACTCTTTTTTGTGCTCATCTTCATAATGTATGTGGTCATCCTTCTGGGG | |
| AATGGTACTCTCATTTTAATCAGCATCTTGGAGCCTCACCTTCACACCCCTATGTACTTCTT | |
| TCTGGGGAACCTCTCCTTCTTGGACATCTGGTACACCACCACCTCTATTCCCTCCACGCTAG | |
| TGAGCTTCCTTTCAGAAAGAAAGACCATTTCCCTTTCTGGCTGTGCAGTGCAGATGTTCCT | |
| CGGCTTGGCCATGGGGACAACAGAGTGTGTGGTTCTGGGCATGATGGCCTTTGACCGCTAT | |
| GTGGCTATCTGCAACCCTCTGAGATATCCCATCATCATGAGTAAGGATGCCTATGTACCCA | |
| TGGCAGCTGGGTCCTGGATCATAGGAGCTGTCAATTCTGCAGTACAATCAGTGTTTGTGGT | |
| ACAATTGCCTTTCTGCAGGAATAACATCATCAATCATTTCACGTGTGAAATTCTGGCTGTC | |
| ATGAAACTGGCGTGTGCTGACATCTCAGACAATGAGTTCATCATGCTTGTGGCCACAACAT | |
| TGTTCATATTGACACCTTTGTTATTAATCATTGTCTCTTACACGTTAATCATTGTGAGCATC | |
| TTCAAAATTAGCTCTTCCGAGGGGAGAAGCAAAGCTTCCTCTACCTGTTCAGCCCATCTGA | |
| CTGTGGTCATAATATFFCTATGGGACCATCCTCTTCATGTACATGAAGCCCAAGTCTAAAGA | |
| GACACTTAATTCGGATGACTTGGATGCTACCGACAAAATTATATCCATGTTCTATGGGGTG | |
| ATGACTCGCATGATGAATCCTTTAATCTACAGTCTTAGAAACAAGGATGTGAAAGAGGCA | |
| GTAAAACACCTACTGAACAGAAGGTTCTTTAGCAAGTGA | |
| AOLFR202 sequences: | |
| MEWENHTILVEFFLKGLSGHPRLELLFFVLIFIMYVVILLGNGTLILISILDPHLHTPMYFFLGNL | (SEQ ID NO: 375) |
| SFLDICYTTTSIPSTLVSFLSERKTISLSGCAVQMFLSLAMGTTECVLLGVMAFDRYVAICNPLR | |
| YPIIMSKDAYVPMAAGSWIIGAVNSAVQTVFVVQLPFCRNNIINHFTCEILAVMKLACADISGN | |
| EFILLVTTTLFLLTPLLLIIVSYTLIILSIFKISSSEGRSKPSSTCSARLTVVITFCGTIFLMYMKPKSQ | |
| ETLNSDDLDATDKLIFIFYRVMTPMMNPLIYSLRNKDVKEAVKHLLRRKNFNK | |
| ATGGAATGGGAAAACCACACCATTCTGGTGGAATTTTTTCTGAAGGGACTTTCTGGTCACC | (SEQ ID NO: 376) |
| CAAGACTTGAGTTACTCTTTTTTGTGCTCATCTTCATAATGTATGTGGTCATCCTTCTGGGG | |
| AATGGTACTCTCATTTTAATCAGCATCTTGGACCCTCACCTTCACACCCCTATGTACTTCTT | |
| TCTGGGGAACCTCTCCTTCTTGGACATCTGCTACACCACCACCTCTATTCCCTCCACGCTAG | |
| TGAGCTTCCTTTCAGAAAGAAAGACCATTTCCCTTTCTGGCTGTGCAGTGCAGATGTTCCT | |
| CAGCTTGGCCATGGGGACAACAGAGTGTGTGCTTCTGGGCGTGATGGCCTTTGACCGCTAT | |
| GTGGCTATCTGCAACCCTCTGAGATATCCCATCATCATGAGTAAGGATGCCTATGTACCCA | |
| TGGCAGCTGGGTCCTGGATCATAGGAGCTGTCAATTCTGCAGTACAAACAGTGTTTGTGGT | |
| ACAATTGCCTTTCTGCAGGAATAACATCATCAATCATTTCACCTGTGAAATTCTAGCTGTC | |
| ATGAAACTGGCCTGTGCTGACATCTCAGGCAATGAGTTCATCCTGCTTGTGACCACAACAT | |
| TGTTCCTATTGACACCTTTGTTATTAATTATTGTCTCTTACACGTTAATCATTTTGAGCATC | |
| TTCAAAATTAGCTCTTCGGAGGGGAGAAGCAAACCTTCCTCTACCTGCTCAGCTCGTCTGA | |
| CTGTGGTGATAACATTCTGTGGGACCATCTTCCTCATGTACATGAAGCCCAAGTCTCAAGA | |
| GACACTTAATTCAGATGACTTGGATGCCACTGACAAACTTATATTCATATTCTACAGGGTG | |
| ATGACTCCCATGATGAATCCTTTAATCTACAGTCTTAGAAACAAGGATGTGAAGGAGGCA | |
| GTAAAACACCTACTGAGAAGAAAAAATTTTAACAAGTAA | |
| AOLFR203 sequences: | |
| MKRQNQSCVVEFILLGFSNFPELQVQLFGVFLVIYVVTLMGNAIITVIISLNQSLHVPMYLFLLN | (SEQ ID NO: 377) |
| LSVVEVSFSAVITPEMLVVLSTEKTMISFVGCFAQMYFILLFGGTECFLLGAMAYDRFAAICHPL | |
| NYPVIMNRGVFMKLVIFSWISGIMVATVQTTWVFSFPFCGPNEINHLFCETPPVLELVCADTFLF | |
| EIYAFTGTILWMVPFLLILLSYIRVLFAILKIMPSTTGRQKAFSTCASHLTSVTLFYGTANMTYLQ | |
| PKSGYSPETKKIISLAYTLLTPLLNPLIYSLRNSEMKRTLIKIWRRKVILHTF | |
| ATGAAAAGACAAAATCAAAGCTGTGTGGTTGAATTCATCCTCCTGGGCTTTTCTAACTTTC | (SEQ ID NO: 378) |
| CTGAGCTCCAGGTGCAGCTCTTTGGGGTTTTCCTAGTTATTTATGTGGTGACCCTGATGGG | |
| AAATGCCATCATTACAGTCATCATCTCCTTAAACCAGAGCCTCCACGTTCCCATGTACCTGT | |
| TCCTCCTGAACCTATCTGTGGTGGAGGTGAGTTTCAGTGCAGTCATTACGCCTGAAATGCT | |
| GGTGGTGCTCTCTACTGAGAAAACTATGATTTCTTTTGTGGGCTGTTTTGCACAGATGTAT | |
| TTCATCCTTCTTTTTGGTGGGACTGAATGTTTTCTCCTGGGAGCGATGGCTTATGACCGATT | |
| TGCTGCAATTTGCCATCCTCTGAACTACCCAGTGATTATGAACAGAGGGGTTTTTATGAAA | |
| TTAGTAATATTCTCATGGATCTCAGGGATCATGGTGGCTACTGTGCAGACCACTTGGGTAT | |
| TTAGTTTTCCATTTTGTGGCCCCAATGAAATTAATCATCTCTTCTGTGAGACTCCCCGGGTA | |
| CTAGAGCTTGTGTGTGCAGACACCTTCTTATTTGAAATCTATGCCTTCACAGGCACCATTTT | |
| GATTGTTATGGTTCCTTTCTTGTTGATCCTCTTGTCTTACATTCGAGTTCTGTTTGCCATCCT | |
| GAAGATGCCATCAACTACTGGGAGACAAAAGGCCTTTTCCACCTGTGCCTCTCACCTCACA | |
| TCTGTGACCCTGTTCTATGGCACAGCCAATATGACTTATTTACAACCCAAATCTGGCTACTC | |
| ACCCGAAACCAAGAAACTGATCTCATTGGCTTACACGTTGCTTACCCCTCTGCTCAATCCG | |
| CTCATCTATAGCTTACGAAACAGTGAGATGAAGAGGACTTTGATAAAACTATGGCGAAGA | |
| AAAGTGATTTTACACACATTCTGA | |
| AOLFR204 sequences: | |
| MEKKKNVTEFILIGLTQNPIMEKVTFVVFLVLYMITLSGNLLIVVTITTSQALSSPMYFFLTHLSL | (SEQ ID NO: 379) |
| IDTVYSSSSAPKLIVDSFQEKKIISFNGCMAQAYAEHIFGATEIILLTVMAGDCYVAICYYLNYTT | |
| IMSHSLCILLVAVAWVGGFLHATIQILFTVWLPFCGPNVIGHFMCDLYPLLKLVCIDTHTLGLFV | |
| AVNSGFICLLNFLILVVSYVIILRSLKNNSLEGRCKALSTCISHIIVVVLFFVPCIFVYLRSVTTLPI | |
| DKAVAVFYTMVVPMLNPVVYTLRNAEVKSAIRKIWRKKVTSDND | |
| ATGGAGAAGAAAAAGAATGTGACTGAATTCATTTTAATAGGTCTTACACAGAACCCCATA | (SEQ ID NO: 380) |
| ATGGAGAAAGTCACGTTTGTAGTATTTTTGGTTCTTTACATGATAACACTTTCAGGCAACC | |
| TGCTCATTGTGGTTACCATTACCACCAGCCAGGCTCTGAGCTCCCCCATGTACTTCTTCCTG | |
| ACCCACCTTTCTTTGATAGACACAGTTTATTCTTCTTCTTCAGCTCCTAAGTTGATTGTGGA | |
| TTCCTTTCAAGAGAAGAAAATCATCTCCTTTAATGGGTGTATGGCTCAAGCCTATGCAGAA | |
| CACATTTTTGGTGCTACTGAGATCATCCTGCTGACAGTGATGGCCTGTGACTGCTATGTGG | |
| CCATCTGCAAACCTCTGAACTACACAACCATTATGAGCCACAGCCTGTGCATTCTCCTGGT | |
| GGCAGTGGCCTGGGTGGGAGGATTTCTTCATGCAACTATTCAGATTCTCTTTACAGTATGG | |
| CTGCCCTTCTGTGGCCCCAATGTCATAGGCCACTTCATGTGTGACTTGTACCCATTGTTAAA | |
| ACTTGTTTGCATAGACACTCATACCCTTGGTGTCTTTGTTGCTGTGAACAGTGGGTTTATGT | |
| GCTTATTAAACTTCCTTATCTTGGTGGTATCCTATGTGATCATCTTGAGATCTTTAAAGAAC | |
| AATAGCTTGGAGGGGAGGTGTAAAGCCCTCTCCACCTGTATTTCTCACATCATAGTAGTTG | |
| TCTTATTCTTTGTGCCCTGTATATTTGTGTATCTGCGCTCAGTGACCACTCTGCCCATTGAT | |
| AAAGCTGTTGCTGTATTTTATACTATGGTGGTCCCAATGTTAAATCCCGTGGTCTACACAC | |
| TCAGAAATGCTGAGGTAAAAAGTGCAATAAGGAAGCTTTGGAGAAAAAAAGTGACTTCAG | |
| ATAATGATTAA | |
| AOLFR205 sequences: | |
| MESENRTVIREFILLGLTQSQDIQLLVFVLVLIFYFIILPGNFLIIFTIKSDPGLTAPLYFFLGNLAFL | (SEQ ID NO: 381) |
| DASYSFTVAPRMLVDFLSAKKIISYRGCITQLFFLHFLGGGEGLLLVVMAFDRYLAICRPLHYPT | |
| VMNPRTCYAMMLALWLGGFVHSIIQVVLILRLPFCGPNQLDNFFCDVPQVIKLACTDTFVVEL | |
| LMVFNSGLMTLLCFLGLLASYAVILCRIRGSSSEAKNKAMSTCITHIIVIFFMFGPGIFIYTRPFRA | |
| FPADKVVSLFHTVIFPLLNPVIYTLRNQEVKASMKKVFNKHIA | |
| ATGGAAAGCGAGAACAGAACAGTGATAAGAGAATTCATCCTCCTTGGTCTGACCCAGTCT | (SEQ ID NO: 382) |
| CAAGATATTCAGCTCCTGGTCTTTGTGCTAGTTTTAATATTCTACTTCATCATCCTCCCTGG | |
| AAATTTTCTCATTATTTTCACCATAAAGTCAGACCCTGGGCTCACAGCCCCCCTCTATTTCT | |
| TTCTGGGCAACTTGGCCTTCCTGGATGCATCCTACTCCTTCACTGTGGCTCCCCGGATGTTG | |
| GTGGACTTCGTCTCTGCGAAGAAGATAATCTCCTACAGAGGCTGCATCACTCAGCTCTTTT | |
| TCTTGCACTTCCTTGGAGGAGGGGAGGGATTAGTCCTTGTTGTGATGGCCTTTGACCGCTA | |
| CATCGCCATCTGCCGGCCTCTGCACTATCCTACTGTCATGAACCCTAGAACCTGCTATGCA | |
| ATGATGTTGGCTCTGTGGCTTGGGGGTTTTGTCCACTCCATTATCCAGGTGGTCCTCATCCT | |
| CCGCTTGCCTTTTTGTGGCCCAAACCAGCTGGACAACTTCTTCTGTGATGTCCCACAGGTC | |
| ATCAAGCTGGCCTGCAGCGACACATTTGTGGTGGAGCTTCTGATGGTCTTCAACAGTGGCC | |
| TGATGACACTCCTGTGCTTTCTGGGGCTTCTGGCCTCCTATGCAGTCATTCTTTGTCGCATA | |
| CGAGGGTCTTCTTCTGAGGGAAAAAACAAGGCCATGTCGACGTGCATCACCCATATCATTG | |
| TTATATTCTTCATGTTTGGACCTGGCATCTTCATCTACACGCGCCCCTTCAGGGCTTTCCCA | |
| GCTGACAAGGTGGTTTCTCTCTTCCACACAGTGATTTTTCCTTTGTTGAATGCTGTCATTTA | |
| TACCCTTCGCAACCAGGAAGTGAAAGCTTCCATGAAAAAGGTGTTTAATAAGCACATAGC | |
| CTGA | |
| AOLFR206 sequences: | |
| MANRNNVTEFILLGLTENPKMQKIIFVVFSVIYINAMIGNVLIVVTITASPSLRSPMYFFLAYLSFI | (SEQ ID NO: 383) |
| DACYSSVNTPKLITDSLYENKTILFNGCMTQVFGEHFFRGVEVILLTVMAYDHYVAICKPLHYT | |
| TIMKQHVCSLLVGVSWVGGFLHATIQILFICQLPFCGPNVIDHFMCDLYTUNLAGTNTHTLGLF | |
| IAANSGFICLLNCLLLLVSCVVILYSLKTHSLEARHEALSTCVSHITVVILSFIPCIFVYMRPPATL | |
| PIDKAVAVFYTMITSMLNPLIYTLRNAQMKNAIRKLCSRKAISSVK | |
| ATGGCGAATAGAAACAATGTGACAGAGTTTATTCTATTGGGGCTTACAGAGAATCCAAAA | (SEQ ID NO: 384) |
| ATGCAGAAAATCATATTTGTTGTGTTTTCTGTCATCTACATCAACGCCATGATAGGAAATG | |
| TGCTCATTGTGGTCACCATCACTGCCAGCCCATCACTGAGATCCCCCATGTACTTTTTCCTG | |
| GCCTATCTCTCCTTTATTGATGCCTGCTATTCCTCTGTCAATACCCCTAAGCTGATCACAGA | |
| TTCACTCTATGAAAACAAGACTATCTTATTCAATGGATGTATGACTCAAGTCTTTGGAGAA | |
| CATTTTTTCAGAGGTGTITGAGGTCATCCTACTTACTGTAATGGCCTATGACCACTATGTGG | |
| CCATCTGCAAGCCCTTGCACTATACGACCATCATGAAGCAGCATGTTTGTAGCCTGCTAGT | |
| GGGAGTGTCATGGGTAGGAGGCTTTCTTCATGCAACCATACAGATCCTCTTCATCTGTCAA | |
| TTACCTTTCTGTGGTCCTAATGTCATAGATCACTTTATGTGTGATCTCTACACTTTGATCAA | |
| TCTTGCCTGCACTAATACCGACACTCTAGGACTCTTCATTGCTGCCAACAGTGGGTTCATAT | |
| GCCTGTTAAACTGTCTCTTGCTCCTGGTCTCCTGCGTGGTCATACTGTACTCCTTAAAGACC | |
| CACAGCTTAGAGGCAAGGCATGAAGCCCTCTCTACCTGTGTCTCCCACATCACAGTTGTCA | |
| TCTTATCCTTTATACCCTGCATATTTGTGTACATGAGACCTCCAGCTACTTTACCCATTGAT | |
| AAAGCAGTTGCTGTATTCTACACTATGATAACTTCTATGTTAAACCCCTTAATCTACACCTT | |
| GAGGAATGCTCAAATGAAAAATGCCATTAGGAAATTGTGTAGTAGGAAAGCTATTTCAAG | |
| TGTCAAATAA | |
| AOLFR207 sequences: | |
| MERTNDSTSTEFFLVGLSAHPKLQTVFFVLILWMYLMILLGNGVLISVIIFDSHLHTPIVIYFFLCN | (SEQ ID NO: 385) |
| LSFLDVCYTSSSVPLILASFLAVKKKVSFSGCMVQMFISFAMGATECMILGTMALDRYVAICYP | |
| LRYPVIMSKGAYVAMAAGSWVTGLVDSVVQTAFAMQLPFCANNVIKHFVCEILAILKLACADI | |
| SINVISMTGSNLIVLVIPLLVISISYIFIVATILRIPSTEGKHKAFSTCSAHLTVVIIFYGTIFFMYAKP | |
| ESKASVDSGNEDIIEALISLFYGVMTPMLNPLIYSLRNKDVKAAVKNILCRKNFSDGK | |
| ATGGAAAGGACCAACGATTCCACGTCGACAGAATTTTTCCTGGTAGGGCTTTCTGCCCACC | (SEQ ID NO: 386) |
| CAAAGCTCCAGACAGTTTTCTTCGTTCTAATTTTGTGGATGTACCTGATGATCCTGCTTGGA | |
| AATGGAGTCCTTATCTCAGTTATCATCTTTGATTCTCACCTGCACACCCCCATGTATTTCTT | |
| GCTCTGTAATCTTTCCTTCCTCGACGTTTGCTACACAAGTTCCTCTGTCCCACTAATTCTTG | |
| CCAGCTTTCTGGCAGTAAAGAAAAAGGTTTCCTTCTCTGGGTGTATGGTGCAAATGTTTAT | |
| TTCTTTTTGCCATGGGGGCCACGGAGTGCATGATCTTAGGCACGATGGCACTGGACCGCTAT | |
| GTGGGCATCTGCTACCCACTGAGATACCCTGTCATCATGAGCAAGGGTGCGTATGTGGCCA | |
| TGGCAGCTGGGTCCTGGGTCACTGGGCTTGTGGACTCAGTAGTGCAGACAGCTTTTGCAAT | |
| GCAGTTACCATTCTGTGCTAATAATGTCATTAAACATTTTGTCTGTGAAATTCTGGCTATCT | |
| TGAAACTGGCCTGTGCTGATATTTCAATCAATGTGATTAGTATGACAGGGTCGAATCTGAT | |
| TGTTCTGGTTATTCCATTGTTAGTAATTTCCATCTCTTACATATTTATTGTTGCCACTATTCT | |
| GAGGATTCCTTCCACTGAAGGAAAACATAAGGCCTTCTCCACCTGCTCAGCCCACCTGACA | |
| GTGGTGATTATATTCTATGGAACCATCTTCTTCATGTACGCAGCCTGAGTCTAAAGCCT | |
| CTGTTGATTCAGGTAATGAAGACATCATTGAGGCCCTCATCTCCCTTTTCTATGGAGTGAT | |
| GACTCCCATGCTTAATCCTCTCATCTATAGTCTGCGAACAAGGATGTAAAGGCTGCTGTC | |
| AAAAACATACTGTGTAGGAAAAACTTTTCTGATGGAAAATGA | |
| AOLFR208 sequences: | |
| MFPANWTSVKVFFFLGFFHYPKVQVIIFAVCLLMYLITLLGNIFLISITILDSHLHTPMYLFLSNL | (SEQ ID NO: 387) |
| SFLDIWYSSSALSPMLANFVSGRNTISFSGCATQMYLSLAMGSTECVLLPMMAYDRYVAICNP | |
| LRYPVIMRTCVQIAAGSWMTGCLTAMVEMMSVLPLSLCGNSIINHFTCEILAILKLVCVDTS | |
| LVQLIMLVISVLLLPMPMLLICISYAFILASILRISSVEGRSKAFSTCTAHLMVVVLFYGTALSMH | |
| LKPSAVDSQEIDKFMALVYAGQTPMLNPHYSLRNKEVKVALKKLLIRNHFNTAFISILK | |
| ATGTTCCCGGCAAATTGGACATCTGTAAAAGTATTTTTCTTCCTGGGATTTTTTCACTACCC | (SEQ ID NO: 388) |
| CAAAGTTCAGGTCATCATATTTGGGGTGTGCTTGCTGATGTACCTGATCACCTTGCTGGGC | |
| AACATTTTTCTGATCTCCATCACCATTCTAGATTCCCACCTGCACACCCCTATGTACCTCTT | |
| CCTCAGCAATCTCTCCTTTCTGGACATCTGGTACTCCTCTTCTGGCCTCTGTCCAATGCTGG | |
| CAAACTTTGTTTCAGGGAGAAACACTATTTCATTCTCAGGGTGCGCCACTCAGATGTACCT | |
| CTCCCTTGCCATGGGGTCCAGTGAGTGTGTGCTCCTGCCCATGATGGCATATGACCGGTAT | |
| GTGGCCATCTGCAACCCCCTGAGATACCCTGTCATCATGAATAGGAGAACCTGTGTGCAGA | |
| TTGCAGCTGGCTCCTGGATGACAGGCTGTCTCACTGCCATGGTGGAAATGATGTCTGTGCT | |
| GCCACTGTCTCTCGTGGTAATAGCATCATCAATCATTTCACTTGTGAAATTCTGGCCATCT | |
| TGAAATTGGTTTGTGTGGACACCTCCCTGGTGCAGTTAATCATGCTGGTGATCAGTGTACT | |
| TCTTCTCCCCATGCCAATGCTACTCATTTGTATCTCTTATGCATTTATCCTCGCCAGTATCC | |
| TGAGAATCAGGTCAGTGGAAGGTCGAAGTAAAGCCTTTTCAACGTGCACAGCCCACCTGA | |
| TGGTGGTAGTTTTGTTCTATGGGACGGCTCTCTCCATGCACCTGAAGCCCTCCGCTGTAGA | |
| TTCACAGGAAATAGACAAATTTATGGCTTTGGTGTATGCCGGACAAACCCCCATGTTGAAT | |
| CCTATCATCTATAGTCTACGGAACAAAGAGGTGAAAGTGGCCTTGAAAAAATTGCTGATTA | |
| GAAATCATTTTAATACTGCCTTCATTTCCATCCTCAAATAA | |
| AOLFR209 sequences: | |
| MDKINQTFVREFILLGLSGYPKLEIIFFALILVMYVVILIGNGVLIIASILDSRLHMPMYFFLGNLS | (SEQ ID NO: 389) |
| FLDICYTTSSIPSTLVSLISKKRNISFSGCAVQMFFGFAMGSTECFLLGMMAFDRYVAICNPLRY | |
| PIIMNKVVYVLLTSVSWLSGGINSTVQTSLAMRWPFCGNNIINHFLCEILAVLKLACSDISVNIV | |
| TLAVSNIAFLVLPLLVIFFSYMFILYTILRTNSATGRHKAFSTCSAHLTVVIIFYGTIFFMYAKPKS | |
| QDLLGKDNLQATEGLVSMFYGVVTPMLNPIIYSLRNKDVKAAIKYLLSRKAINQ | |
| ATGGACAAGATAAACCAGACATTTGTGAGAGAATTCATTCTTCTGGGACTCTCTGGTTACC | (SEQ ID NO: 390) |
| CCAAACTTGAGATCATTTTCTTTGCTCTGATTCTAGTTATGTACGTAGTGATTCTAATTGGC | |
| AATGGTGTTCTGATCATAGCAAGCATCTTGGATTCTCGTCTTCACATGCCCATGTACTTCTT | |
| CCTGGGCAACCTCTCTTTCCTGGATATCTGCTATACAACCTCCTCCATTCCCTCAACACTGG | |
| TGAGCTTAATCTCAAAGAAAAGAAACATTTCCTTCTCTGGATGTGCAGTGCAGATGTTCTT | |
| TGGGTTTGCAATGGGGTCAACAGAATGTTTCCTCCTTGGCATGATGGCATTTGATCGTTAT | |
| GTGGCCATCTGTAACCCTCTGAGATACCCCATCATCATGAACAAGGTGGTGTATGTACTGC | |
| TGACTTCTGTATCATGGCTTTCTGGTGGAATCAATTCAACTGTGCAAACATCACTTGCCAT | |
| GCGATGGCCTTTCTGTGGGAACAATATTATTAATCATTTCTTATGCGAGATCTTAGCTGTCC | |
| TAAAATTAGCTTGTTCTGATATATCTGTCAATATTGTTACCCTAGCAGTGTCAAATATTGGT | |
| TTCCTAGTTCTTCCTCTGCTCGTGATTTTTTTCTCCTATATGTTCATCCTCTACACCATCTTG | |
| CGAACGAACTCGGCCACAGGAAGACACAAGGCATTTTCTACATGCTCAGCTCACCTGACTG | |
| TGGTGATCATATTTTATGGTACCATCTTCTTTATGTATGCAAAACCTAAGTCCCAGGAGCTC | |
| CTTGGGAAAGACAACTTGCAAGCTACAGAGGGGCTTGTTTCGATGTTTTATGGGGTTGTGA | |
| CCCCCATGTTAAACCCCATAATCTATAGCTTGAGAAATAAAGATGTAAAAGCTGCTATAAA | |
| ATATTTGCTGAGCAGGAAAGCTATTAACCAGTAA | |
| AOLFR210 sequences: | |
| MMGRRNDTNVADFILTGLSDSEEVQMALFMLFLLIYLITMLGNVGMLLIIPIDLQLHTPMYFFL | (SEQ ID NO: 391) |
| THLSFIDLSYSTVVTPKTLANLLTSNYISFTGCFAQMFCFVFLGTAECYLLSSMAYDRYAAICSP | |
| LHYTVIMPKRLCLALITGPYVIGFMDSFVNVVSMSRIHFCDSNIIHHFFCDTSPILALSCTDTDN | |
| TEMLIFIIAGSTLMVSLITISASYVSILSTILKINSTSGKQKAFSTCVSHLLGVTIFYGTMIFTYLKP | |
| RKSYSLGRDQVAPVFYTIVIPMLNPLIYSLRNPVKNALIRVMQRRQDSR | |
| ATGATGGGTAGAAGGAATGACACAAATGTGGCTGACTTCATCCTTACGGGACTGTCAGAC | (SEQ ID NO: 392) |
| TCTGAAGAGGTCCAGATGGCTCTGTTTATGCTATTTCTCCTCATATACCTAATTACTATGCT | |
| GGGGAATGTGGGGATGCTATTGATAATCCGCGTGGACCTCCAGCTTCACACTCCCATGTAT | |
| TTTTTCCTTACTCACCTGTCATTTATTGACCTCAGTTACTCAACTGTCGTCACACCTAAAAC | |
| CTTAGCGAACTTACTGACTTCCAACTATATTTCCTTCACGGGCTGCTTTGCCCAGATGTTCT | |
| GTTTTGTCTTCTTGGGTACTGCTGAATGTTATCTTCTCTCCTCAATGGCCTATGATCGCTAT | |
| GCAGGGATCTGCAGTCCTGTACACTACACAGTTATTATGCCCAAAAGGCTCTGCCTCGCTC | |
| TCATCACTGGGCCTTATGTGATTGGCTTTATGGACTCCTTTGTCAATGTGGTTTCCATGAGC | |
| AGATTGCATTTCTGTGACTCAAACATAATTCATCACTTTTTCTGTGACACTTCCCCAATTTT | |
| AGCTCTGTCCTGCACTGACACAGACAACAGTGAAATGCTGATATTCATTATCGCTGGTTGC | |
| ACCCTGATGGTGTCCCTTATCACAATATCTGCATCCTATGTGTCCATTCTCTCTACCATCCT | |
| GAAAATTAATTCCACTTCAGGAAAGGAGAAAGCTTTCTCTACTTGCGTCTCTCATCTCTTG | |
| GGAGTCACCATCTTCTATGGAACTATGATTTTTACTTACTTAAAGCCAAGAAAGTCTTATT | |
| CCTTGGGAAGAGATCAAGTGGCTCCTGTGTTTTATACTATTGTGATTCCCATGCTGAATCC | |
| ACTCATTTATAGTCTTAGAAACAGAGAAGTGAAAAATGCTGTCATTAGAGTCATGCAGAG | |
| AAGACAGGACTCCAGGTAG | |
| AOLFR211 sequences: | |
| MMGRRNNTNVADFILMGLTLSEEIQMALFMLFLLIYLITMLGNVGMILIIRLDLQLHTPMYFFL | (SEQ ID NO: 393) |
| THLSFIDLSYSTVVTPKTLANLLTSNYISFTGCFAQMFFFAFLGTAECYLLSSMAHDRYAAICSP | |
| LHYTVIMSKRLCLALITGPYVIGFIDSFVNVVSMSRLHFYDSNVIHHFFCDTSPILALSCTDTYNT | |
| EILIFIIVGSTLMVSLFTISASYVFILFTILKINSTSGKQKAFSTCVSHLLGVTIFYSTLIFTYLKPRK | |
| SYSLGRDQVASVFYTIVIPVLNPLIYSLRNKEVKNAVIRVMQRRQDSR | |
| ATGATGGGTAGAAGGAATAACACAAATGTGGCTGACTTCATCCTTATGGGACTGACACTTT | (SEQ ID NO: 394) |
| CTGAAGAGATCCAGATGGCTCTGTTTATGCTATTTCTCCTGATATACCTAATTACTATGCTG | |
| GGGAATGTGGGGATGATATTGATAATCCGCCTGGACCTCCAGCTTCACACTCCCATGTATT | |
| TTTTCCTTACTCACCTGTGATTTATTGACCTCAGTTACTCAACTGTCGTCACACCTAAAACC | |
| TTAGCGAACTTACTGACTTCCAACTATATTTCCTTTACGGGCTGCTTTGCCCAGATGTTCTT | |
| TTTTGCCTTCTTGGGTACTGCTGAATGTTACCTTCTCTCCTCAATGGCCCATGATCGCTATG | |
| CAGCGATCTGCAGTCCTCTACACTACACAGTTATTATGTCCAAAAGGCTCTGCCTCGCTCT | |
| CATCACTGGGCCTTATGTGATTGGCTTTATAGACTCCTTTGTCAACGTGGTTTCCATGAGCA | |
| GATTGCATTTCTACGAGTCAAACGTAATTCATCACTTTTTCTGTGACACTTCCCCAATTTTA | |
| GCTCTGTCCTGCACTGATACATACAACACCGAAATCCTGATATTCATTATTGTTGGTTCCAC | |
| CCTGATGGTGTCCCTTTTCACAATATCTGCATCCTATGTGTTCATTCTCTTTACCATCCTGA | |
| AAATTAATTCCACTTCAGGAAAGCAGAAAGCTTTCTCTACTTGCGTCTCTCATCTCTTGGG | |
| AGTCACCATCTTTTATAGCACTCTGATTTTTACTTATTTAAAACCAAGAAAGTCTTATTCCT | |
| TGGGAAGAGATCAAGTGGCTTCTGTTTTTTATACTATTGTGATTCCCGTGCTGAATCCACT | |
| CATTTATAGTCTTAGAAACAAAGAGGTGAAAAATGCTGTCATCAGAGTCATGCAGAGAAG | |
| ACAGGACTCCAGGTAA | |
| AOLFR212 sequences: | |
| MAGNNFTEVTVFILSGFANHPELQVSLFLMFLFIYLFTVLGNLGLITLIRMDSQLHTPMYFFLSN | (SEQ ID NO: 395) |
| LAFIDIFYSSTVTPKALVNFQSNRRSISFVGCFVQMYFFVGLVCCECFLLGSMAYNRYIAICNPL | |
| LYSVVMSQKVSNWLGVMPYVLGFTSSLISVWVISSLAFCDSSINHFFCDTTALLALSCVDTFGT | |
| EMVSFVLAGFTLLSSLLIITVTYIIIISAILRIQSAAGRQKAFSTCASHLMAVTIFYGSLIFTYLQPD | |
| NTSSLTQAQVASVFYTIVIPMLNPLIYSLRNKDVKNALLRVIHRYIFP | |
| ATGGCTGGCAACAATTTCACTGAGGTTACCGTCTTCATCCTCTCTGGATTTGCAAATCACC | (SEQ ID NO: 396) |
| CTGAATTACAAGTCAGTCTTTTCTTGATGTTTCTCTTCATTTATCTATTCACTGTTTTGGGA | |
| AACCTGGGACTGATCACGTTAATCAGAATGGATTCTCAGCTTCACACCCCTATGTACTTTT | |
| TCCTGAGCAATTTAGCATTTATTGACATATTTTACTCCTCTACTGTAACACCTAAGGCATTG | |
| GTGAATTTCCAATCCAATCGGAGATCCATCTCCTTTGTTGGCTGCTTTGTTCAAATGTACTT | |
| TTTTGTTGGATTGGTGTGTTGTGAGTGTTTCCTTCTGGGATCAATGGCCTACAATCGCTACA | |
| TAGCAATCTGCAATCCCTTACTGTATTCAGTAGTCATGTCCCAAAAAGTGTCCAACTGGCT | |
| GGGAGTAATGCCATATGTGATAGGCTTCACAAGCTCGCTGATATCTGTCTGGGTGATAAGC | |
| AGTTTGGCGTTCTGTGATTCCAGCATCAATCATTTTTTTTGTGACACCACAGCTCTTTTAGC | |
| ACTCTCCTGTGTAGATACATTCGGCACAGAAATGGTGAGCTTTGTCTTAGCTGGATTCACT | |
| CTTCTTAGCTCTCTCCTTATCATCACAGTCACTTATATCATCATCATCTCAGCCATCCTGAG | |
| GATCCAGTCAGCAGCAGGCAGGCAGAAGGCCTTCTCCACCTGCGCATCCCACCTCATGGCT | |
| GTAACTATCTTTTATGGGTCTCTGATTTTCACCTATTTGCAACCTGATAACACATCATCGCT | |
| GACCCAGGCGCAGGTGGCATCTGTATTCTATACGATTGTCATTCCCATGCTGAATCCACTC | |
| ATCTACAGTCTGAGGAACAAAGATGTGAAAAATGCTCTTCTGAGAGTCATACATAGAAAA | |
| CTTTTTCCATGA | |
| AOLFR213 sequences: | |
| MNSLGKLVSMILSAHVFCYSKFNCFGCTHSIPALGADPPGGMGLGNESSLMDFILLGFSDHPRL | (SEQ ID NO: 397) |
| EAVLFVFVLFFYLLTLVGNFTIIIISYLDPPLHTPMYFFLSNLSLLDICFTTSLAPQTLVNLQRPKK | |
| TITYGGCVAQLYISLALGSTECILLAIDMALDRYIAVCKPLHYVVIMNPPICQQLASISWLSGLA | |
| SSLIHATFTLQLPLCGNHRLDHFICEVPALLKLACVDTTVNELVLFVVSVLFVVIPPALISISYGFI | |
| TQAVLRIKSVEARHKAFSTCSSHLTVVIIFYGTIIYVYLQPSDSYAQDQGKYISLFYTMVTPTLNP | |
| IIYTLRNKDMKEALRKLLSGKL | |
| ATGAATAGTTTGGGAAAGTTGGTCTCCATGATCCTCTCAGCTCATGTGTTCTGTTATTCTAA | (SEQ ID NO: 398) |
| ATTAATTGTTTTGGATGTACCCATTCCATTCCTGCCTTAGGTGCGGATCCCCCTGGAGGG | |
| ATGGGATTGGGCAATGAGAGTTCCCTAATGGATTTGATGCTTCTAGGCTTCTCAGACCACC | |
| CTCGTCTGGAGGCTGTTCTCTTTGTATTTGTCGTTTTCTTCTACCTCCTGACCCTTGTGGGA | |
| AACTTCACCATAATCATCATCTCATATCTGGATCCCCCTCTTCATACCCCAATGTACTTTTT | |
| TCTCAGCAACCTCTCTTTACTGGACATCTGCTTCACTACTAGCCTTGGTCCTCAGACCTTAG | |
| TTAACTTGCAAAGACCAAAGAAGACGATCACTTACGGTGGTTGTGTGGCGCAACTCTATAT | |
| TTCTCTGGCACTGGGCTCCACTGAATGTATCCTCTTGGCTGACATGGCCTTGGATCGGTAC | |
| ATTGCTGTCTGCAAACCCCTCCACTATGTAGTCATCATGAACCCAGGGCTTTGCCAACAGC | |
| TGGCATCTATCTCCTGGCTCAGTGGTTTGGCTAGTTCCCTAATCCATGCAACTTTTACCTTG | |
| CAATTGCCTCTCTGTGGCAACCATAGGCTGGACCATTTTATTTGCGAAGTACCAGCTCTTCT | |
| CAAGTTGGCTTGTGTGGACACCACTGTCAATGAATTGGTGCTTTTTGTTGTTAGTGTTCTGT | |
| TTGTTGTCATTCCACCAGCACTCATCTCCATCTCCTATGGCTTCATAACTCAAGCTGTGCTG | |
| AGGATCAAATCAGTAGAGGCAAGGCATAAAGCCTTCAGCACCTGCTCCTCCCACCTTACAG | |
| TGGTGATTATATTCTATGGCACCATAATCTACGTGTACCTGCAACCTAGTGACAGCTATGC | |
| CCAGGACCAAGGGAAGTTTATCTCCCTCTTCTACACCATGGTGACCCCCACTTTAAATCCT | |
| ATCATCTATACTTTAAGGAACAAGGATATGAAAGAGGCTCTGAGGAAACTCTCTCGGGA | |
| AAATTGTGA | |
| AOLFR214 sequences: | |
| MDKSNSSVVSEFVLLGLCSSQKLQLFYFCFFSVLYTVIVLGNLLIILTVTSDTSLHSPMYFLLGN | (SEQ ID NO: 399) |
| LSFVDICQASFATPKMIADFLSAHETISFSGCIAQIFFIHLFTGGEMVLLVSMAYDRYVAICKPLY | |
| YVVIMSRRTCTVLVMISWAVSLVHTLSQLSFTVNLPFCGPNVVDSFFCDLPRVTKLACLDSYIIE | |
| ILIVVNSGILSLSTFSLLVSSYIHLVTVWLKSSAAAMAIAFSTLASHIAVVILFFGPCIFIYVWPFTIS | |
| PLDKFLAIFYTVFTPVLNPIIYTLRDMKAAVRKAVNHYLRPRPISEMSLVVRTSFH | |
| ATGGATAAGTCCAATTCTTCAGTGGTGTCTGAATTTGTACTGTTGGGACTCTGTAGTTCTC | (SEQ ID NO: 400) |
| AAAAACTCCAGCTTTTCTATTTTTGTTTCTTCTCTGTGTTGTATACAGTCATTGTGCTGGGA | |
| AATCTTCTCATTATCCTCACAGTGACTTCTGATACCAGCCTGCACTCCCCTATGTACTTTCT | |
| CTTGGGAAACCTTTCCTTTGTTGACATTTGTCAGGCTTCTTTTGCTACCCCTAAAATGATTG | |
| CAGATTTTCTGAGTGCACACGAGACCATATCTTTCAGTGGCTGCATAGCCCAAATTTTCTTT | |
| ATTCACCTTTTTACTGGAGGGGAGATGGTGCTACTTGTTTCGATGGCCTATGACAGGTATG | |
| TAGCCATATGCAAACCCTTATACTATGTGGTCATCATGAGCCGAAGGACATGCACTGTCTT | |
| GGTAATGATCTCCTGGGCTGTGAGCTTGGTGCACACATTAAGCCAGTTATCATTTACTGTG | |
| AACCTGCCTTTTTGTGGACCTAATGTAGTAGACAGCTTTTTTTGTGATCTTCCTCGAGTCAC | |
| CAAACTTGCCTGGCTGGACTCTTACATCATTGAAATACTAATTGTGGTCAATAGTGGAATT | |
| CTTTCCCTAAGCACTTTCTCTCTCTTGGTCAGCTCCTACATCATTATTCTTGTTACAGTTTG | |
| GCTCAAGTCTTCAGCTGCAATGGCAAAGGCATTTTCTACGCTGGCTTCCCATATTGCAGTA | |
| GTAATATTATTCTTTGGACCTTGCATCTTCATCTATGTGTGGCCCTTTACCATCTCTCCTTT | |
| GGATAAATTTCTTGCCATATTTTACACTGTTTTCACCCCCGTCCTAAACCCCATTATTTATA | |
| CACTAAGGAATAGGGATATGAAGGCTGCCGTAAGGAAAATTGTGAACCATTACCTGAGGC | |
| CAAGGAGAATTTCTGAAATGTCACTAGTAGTGAGAACTTCCTTTCATTAA | |
| AOLFR215 sequences: | |
| MAHTNESMVSEFVLLGLSNSWGLQLFFFAIFSIVYVTSVLGNVLIIVIISFDSHLNSPMYFLLSNL | (SEQ ID NO: 401) |
| SFIDICQSNFATPKMLVDFFIERKTISFEGCMAQIFVLHSFVGSEMMLLVAMAYDRFIAICKPLH | |
| YSTIMNRRICVIFVSISWAVGVLHSVSHLAFTVDLPFCGPNEVDSFFCDLPLVIELACMDTYEM | |
| EIMTLTNSGLISLSCFLALIISYTIILIGVRCRSSSGSSKALSTLTAHITVVILFFGPCIYFYIWPFSRL | |
| PVDKFLSVFYTVCTPLLNPIIYSLRNEDVKAAMWKLRNHHVNSWKN | |
| ATGGCTCACACAAATGAATCGATGGTGTGTGAGTTTGTACTTTTGGGACTCTCTAATTCCT | (SEQ ID NO: 402) |
| GGGGACTTGAACTTTTCTTTTTCGCCATCTTCTCTATAGTCTATGTGACATCAGTGCTAGGC | |
| AATGTCTTAATTATTGTCATTATTTCTTTTGACTCCCATTTGAACTCTCCTATGTACTTCTTG | |
| CTCAGTAATCTTTCTTTCATTGATATCTGTCAGTGTAACTTTGCCACCCCCAAGATGCTTGT | |
| AGACTTTTTTATTGAGCGCAAGACTATCTCCTTTGAGGGTTGCATGGCCCAGATATTCGTT | |
| CTTCACAGTTTTGTTGGGAGTGAGATGATGTTGCTTGTAGCTATGGCATATGACAGATTTA | |
| TAGCCATATGTAAGCCTCTGCACTACAGTACAATTATGAACCGGAGGCTCTGTGTAATTTT | |
| TGTGTCTATTTCCTGGGCGGTGGGCGTTCTTCATTCTGTGAGCCACTTGGCTTTTACAGTGG | |
| ACCTGCCATTCTGTGGTCCCAATGAGGTGGATAGCTTCTTTTGTGACCTTCCCTTGGTGATA | |
| GAGCTGGCTTGCATGGATACATATGAAATGGAAATTATGACCCTAACGAACAGTGGCCTG | |
| ATATCATTGAGCTGTTTCCTGGCTTTAATTATTTCCTACACCATCATTTTGATCGGTGTCCG | |
| ATGCAGGTCCTCCAGTGGGTCATCTAAGGCTCTTTCTACATTAACTGCCCACATCACAGTG | |
| GTCATTCTTTTCTTCGGGCCTTGCATTTATTTCTATATATGGCCTTTTAGCAGACTTCCTGT | |
| GGACAAATTTCTTTCTGTGTTCTACACTGTTTGTACTCCCTTGTTGAACCCCATCATCTACT | |
| CTTTGAGGAATGAAGATGTTAAAGCAGCCATGTGGAAGCTGAGAAACCATCATGTGAACT | |
| CCTGGAAAAACTAG | |
| AOLFR216 sequences: | |
| MDVGNKSTMSEFVLLGLSNSWELQMFFFMVFSLLYVATMVGNSLIVITVIVDPHLHSPMYFLL | (SEQ ID NO: 403) |
| TNLSIIDMSLASFATPKMITDYLTGHKTISFDGCLTQIFFLHLFTGTEIILLMAMSFDRYIAICKPL | |
| HYASVISPQVCVALVVASWIMGVMHSMSQVIFALTLPFCGPYEVDSFFCDLPVVFQLACVDTY | |
| VLGLFMISTSGIIALSCFIVLFNSYVIVLVTVKHHSSRGSSKALSTCTAHFIVVFLFFGPCIFIYMW | |
| PLSSFLTDKILSVFYTIFTPTLNPIIYTLRNQEVKIAMRKLKNRFLNFNKAMPS | |
| ATGGATGTGGGCAATAAGTCTACCATGTCTGAATTTGTTTTGCTGGGGCTCTCTAATTCCT | (SEQ ID NO: 404) |
| GGGAACTACAGATGTTTTTCTTTATGGTGTTTTCATTGCTTTATGTGGCAACAATGGTGGG | |
| TAACAGCCTCATAGTCATCACAGTTATAGTGGACCCTCACCTACACTCTCCTATGTATTTCC | |
| TGCTTACCAATCTTTCAATCATTGATATGTCTCTTGCTTCTTTCGCCACCCCAAAGATGATT | |
| ACAGATTACCTAACAGGTCACAAAACCATCTCTTTTGATGGCTGCCTTACCCAGATATTCT | |
| TTCTCCACCTTTTCACTGGAACTGAGATCATCTTACTCATGGCCATGTCCTTTGATAGGTAT | |
| ATTGCAATATGCAAGCGCCTGCACTATGCTTCTGTCATTAGTCCCCAGGTGTGTGTTGCTCT | |
| CGTGGTGGCTTCCTGGATTATGGGAGTTATGCATTCAATGAGTCAGGTCATATTTGCCCTC | |
| ACGTTACCATTCTGTGGTCCCTATGAGGTAGACAGCTTTTTCTGTGACCTTCCTGTGGTGTT | |
| CCAGTTGGCTTGTGTGGATACTTATGTTCTGGGCCTCTTTATGATCTGAACAAGTGGCATA | |
| ATTGCGTTGTCCTGTTTTATTGTTTTATTTAATTCATATGTTATTGTCCTGGTTACTGTGAA | |
| GCATCATTCTTCCAGAGGATCATCTAAGGCCCTTTCTACTTGTACAGCTCATTTCATTGTTG | |
| TCTTCTTGTTCTTTGGGCCATGCATCTTCATCTACATGTGGCCACTAAGCAGCTTTGTCACA | |
| GACAAGATTCTGTCTGTGTTTTATACCATCTTTACTCCCACTCTGAACCCAATAATCTATAC | |
| TTTGAGGAATCAAGAAGTAAAGATAGCCATGAGGAACTGAAAAATAGGTTTCTAAATTT | |
| TAATAAGGCAATGCCTTCATAG | |
| AOLFR217 sequences: | |
| MLESFQKSEQMAWSNQSAVTEFILRGLSSSLELQIFYFLFFSIVYAATVLGNLLIVVTIASEPHLH | (SEQ ID NO: 405) |
| SPTYFLLGNLSFIDMSLASFATPKMTADFLREHKAISFEGCMTQMFFLHLLGGAEIVLLISMSFD | |
| RYVAICKPLHYLTIMSRRMCVGLVILSWIVGIFHALSQLAFTVNLPFCGPNEVDSFFCDLPLVIK | |
| LACVDTYILGVFMISTSGMIALVCFILLVISYTIILVTVRQRSSGGSSKALSTCSAHFTVVTLFFGP | |
| CTFIYVWPFTNFPIDKVLSVFYTIYTPLLNPVIYTVRNKDVKYSMRKLSSHIFKSRKTDHTP | |
| ATGGTAGAGTCCTTCCAGAAATCAGAGCAAATGGCCTGGAGCAATCAGTCTGCGGTAACC | (SEQ ID NO: 406) |
| GAATTCATACTACGGGGTCTGTCCAGTTCTTTAGAACTCCAGATTTTCTACTTCCTGTTTTT | |
| CTCCATAGTCTATGCAGCCACTGTGCTGGGGAACCTTCTTATTGTGGTCACCATTGCATCA | |
| GAGCCACACCTTCATTCCCCTACGTACTTTCTGCTGGGCAATCTCTCCTTCATTGACATGTC | |
| CCTGGCCTCATTTGCCACCCCCAAAATGATTGCAGACTTCCTTAGAGAACACAAAGCCATC | |
| TCTTTTGAAGGCTGCATGACCCAGATGTTCTTCCTAGATCTGTTAGGGGGTGCTGAGATTG | |
| TACTGCTGATCTCCATGTCCTTTGATAGGTACGTGGCTATCTGTAAGCCTCTACATTACCTA | |
| ACAATCATGAGCCGAAGAATGTGTGTTGGGCTTGTGATACTTTCCTGGATTGTCGGCATGT | |
| TCCATGCTCTGAGTCAGTTAGCATTTACAGTGAATCTGCCCTTCTGTGGACCCAATGAAGT | |
| AGACAGTTTCTTTTGTGACCTCCCTTTGGTGATTAAACTTGCTTGTGTCGACACATATATTC | |
| TGGGGGTGTTCATGATCTCAACCAGTGGCATGATTGCCCTGGTGTGCTTCATGCTCTTGGT | |
| GATCTCTTACACTATCATCCTGGTGACCGTTCGGCAGCGTTCCTCTGGTGGATCCTCCAAA | |
| GCCCTCTCCACGTGCAGTGCCCACTTTACTGTTGTGACCCTTTTCTTTGGCCCATGCACTTT | |
| CATTTATGTGTGGCCTTTCACAAATTTCCCAATAGACAAAGTACTCTCAGTATTTTATACCA | |
| TATACACTCCCGTCTTGAATCCAGTGATCTATACCGTTAGGAATAAAGATGTCAAGTATTC | |
| CATGAGGAAACTAAGCAGCCATATCTTTAAATCTAGGAAGACTGATCATACTCCTTAA | |
| AOLFR218 sequences: | |
| METANYTKVTEFVLTGLSQTREVQLVLFVIFLSFYLFILPGNILIICTIRLDPHLTSPMYFLLANLA | (SEQ ID NO: 407) |
| LLDIWYSSITAPKMLIDFFVERKIISFGGCIAQLFFLHFVGASEMFLLIVMAYDRYAAICPYLHYA | |
| TIMNRRLCCILVALSWMGGFIHSIIQVALIVRLPFCGPNELDSYFCDITQVVPIACANTFPEELVM | |
| ICSSGLISVVCFIALLMSYAFLLALLKKHSGSDENTNRAMSTCYSHITIVVLMFGPSIYIYARPFD | |
| SFSLDKVVSVFHTVIFPLLNPIIYTLRNKEVKAAMRKVVTKYILCEEK | |
| ATGGCTGCAAATTACACCAAGGTGACAGAATTTGTTCTCACTGGCCTATCCCAGACTC | (SEQ ID NO: 408) |
| GGGAGGTCCAACTAGTCCTATTTGTTATATTTCTATCCTTCTATTTGTTCATCCTACCAGGA | |
| AATATCCTTATCATTTGCACCATCAGGCTAGACCCTCATCTGACTTCTCCTATGTATTTCCT | |
| GTTGGCTAATCTGGCCCTCCTTGATATTTGGTACTCTTCCATTACAGCCCCTAAAATGCTCA | |
| TAGACTTCTTTGTGGAGAGGAAGATAATTTCCTTTGGTGGATGCATTGCACAGCTCTTCTT | |
| CTTACACTTTGTTGGGGCTTCGGAGATGTTCTTGCTGATAGTGATGGCCTATGACCGCTAT | |
| GCTGCTATCTGCCGACCCCTCCACTATGCTACCATCATGAATCGACGTCTCTGCTGTATCCT | |
| GGTGGCTCTCTCCTGGATGGGGGGCTTCATTCATTCTATAATACAGGTGGCTCTCATTGTT | |
| CGACTTCCTTTCTGTGGGCCCAATGAGTTAGACAGTTACTTCTGTGACATCACACAGGTTG | |
| TCCGGATTGCCTGTGCCAAGACCTTCCCAGAGGAGTTAGTGATGATCTGTAGTAGTGGTCT | |
| GATCTCTGTGGTGTGTTTCATTGCTCTGTTAATGTCCTATGCCTTCCTTCTGGCCTTGCTCA | |
| AGAAACATTCAGGCTCAGATGAGAATACCAACAGGGCCATGTCCACCTGCTATTCCCACAT | |
| TACCATTGTGGTGCTAATGTTTGGGCCATCCATCTACATTTATGCTCGCCCATTTGACTCAT | |
| TTTCCCTAGATAAAGTGGTGTCTGTGTTTCATACTGTAATATTCCCTTTACTTAATCCCATT | |
| ATTTACACATTGAGAAACAAGGAAGTAAGGCAGCCATGAGGAAGGTGGTCACCAAATAT | |
| ATTTTGTGTGAAGAGAAGTGA. | |
| AOLFR219 sequences: | |
| MLTSLTDLCFSPIQVAEIKSLPKSMNETNHSRVTEFVLLGLSSSRELQPFLFLTFSLLYLAILLGNF | (SEQ ID NO: 409) |
| LIILTVTSDSRLHTPMYFLLANLSFIDVCVASFATPKLADFLVERKTISFDACLAQIFFVHLFTGS | |
| EMVLLVSMAYDRYVAICKPLHYMTVMSRRVCVVLVLISWFVGFIHTTSQLAFTVNLPFCGPN | |
| KVDSFFCDLPLVTKLACIDTYVVSLLIVADSGFLSLSSFLLLVVSYTVILVTVRNRSSASMAKAR | |
| STLTAHITVVTLFFGPCIFIYVWPFSSYSVDKVLAVFYTIFTLILNPVIYTLRNKEVKAAMSKLKS | |
| RYLKPSQVSVVIRNVLFLETK. | |
| ATGCTCACTTCATTAACTGATCTCTGTTTCTCTCCTATTCAGGTAGCTGAAATTAAGTCCCT | (SEQ ID NO: 410) |
| TCCAAAATCGATGAATGAGACAAATCATTCTCGGGTGACAGAATTTGTGTTGCTGGGACTG | |
| TCTAGTTCAAGGGAGCTCCAACCTTTCTTGTTTCTTACATTTTCACTACTTTATCTAGCAAT | |
| TCTGTTGGGCAACTTTCTCATCATCCTGACTGTGACCTCAGATTCCCGCCTTCACACCCCCA | |
| TGTACTTTCTGCTTGCAAACCTGTCATTTATAGACGTATGTGTTGCCTCTTTTTGCTACCCCT | |
| AAAATGATTGCAGACTTTCTGGTTGAGCGCAAGACTATTTCTTTTGATGCCTGCCTGGCCG | |
| AGATTTTCTTTGTTCATCTCTTCACTGGCAGTGAAATGGTGCTCCTAGTTTCCATGGCCTAT | |
| GACCGTTATGTTGCTATATGCAAACCTCTCCACTACATGACAGTCATGAGCCGTCGTGTAT | |
| GTGTTGTGCTCGTCCTCATTTCATGGTTTGTGGGCTTCATCCATACTACCAGCCAGTTGGCA | |
| TTCAGTGTTAATCTGGCATTTTGTGGTCCTAATAAGGTAGACAGTTTTTTCTGTGACCTTCC | |
| TCTAGTGACCAAGTTAGCCTGCATAGACACTTATGTTGTCAGCTTACTAATAGTTGCAGAT | |
| AGTGGCTTTCTTTCTCTGAGTTCCTTTCTCCTCTTGGTTGTCTCCTACACTGTAATACTTGTT | |
| ACAGTTAGGAATCGCTCCTCTGCAAGCATGGCGAAGGCCCGCTCCACATTGACTGCTCACA | |
| TCACTGTGGTCACTTTATTCTTTGGACCATGCATTTTCATCTATGTGTGGCCCTTCAGCAGT | |
| TACTCAGTTGACAAGTCCTTGCTGTATTCTACACCATCTTCACGCTTATTTTAAACCCTGT | |
| AATCTACACGCTAAGAAACAAAGAAGTGAAGGCAGCTATGTCAAAACTGAAGAGTCGGTA | |
| TCTGAAGCCTAGTCAGGTTTCTGTAGTCATAAGAATGTTCTTTTCCTAGAAACAAAGTAA. | |
| AOLFR220 sequences: | |
| MKQYSVGNQHSNYRSLLFPFLCSQMTQLTASGNQTMVTEFLFSMFPHAHRGGLLFFIPLLLIYG | (SEQ ID NO: 411) |
| FILTGNLIMFIVIQVGMALHTPLYFFISVLSFLEICYTTTTIPKMLSCLISEQKSISVAGCLLQMYFF | |
| HSLGITESCVLTAMAIDRYIAICNPLRYPTIMIPKLCIQLTVGSCFCGFLLVLPEIAWISTLPFCGS | |
| NQIHQIFCDFTPVLSLACTDTFLVVIVDAIHAAEIVASFLVIALSYIRIIVILGMHSAEGHHKAFST | |
| CAAHLAVFLLFFGSVAVMYLRFSATYSVFWDTAIAVTFVILAPFFNPIIYSLKNKDMKEAIGRLF | |
| HYQKRAGWAGK. | |
| ATGAAGCAATATTCAGTGGGTAATCAACATTCCAATTATAGGAGTCTCTTGTTTCCTTTTCT | (SEQ ID NO: 412) |
| GTGTTCACAGATGACACAGTTGACGGCCAGTGGGAATCAGACAATGGTGACTGAGTTCCT | |
| CTTGTCTATGTTCCCGCATGCGCACAGAGGTGGCCTCTTATTCTTTATTCCGTTGCTTCTCA | |
| TCTACGGATTTATCCTAACTGGAAACCTAATAATGTTCATTGTCATCCAGGTGGGCATGGC | |
| CCTGCACACCCCTTTGTATTTCTTTATCAGTGTCCTCTCCTTCCTGGAGATCTGCTATACCA | |
| CAACCACCATCCGCAAGATGCTGTCCTGCCTAATCAGTGAGCAGAAGAGGATTTCCGTGGC | |
| TGGCTGCCTCCTGCAGATGTACTTTTTCCACTCACTTGGTATCACAGAAAGCTGTGTCCTG | |
| ACAGCAATGGCCATTGACAGGTACATAGCTATCTGCAATCCACTCCGTTACCCAACCATCA | |
| TGATTCCCAAACTTTGTATCCAGCTGACAGTTGGATCCTGCTTTTGTGGCTTCCTCCTTGTG | |
| CTTCCTGAGATTGCATGGATTTCCACCTTGCCTTTCTGTGGCTCCAAGCAGATCCACCAGAT | |
| ATTCTGTGATTTCACACCTGTGCTGAGCTTGGCCTGCACAGATACATTGCTAGTGGTCATT | |
| GTGGATGCCATCCATGCAGCGGAAATTGTAGCCTCCTTCCTGGTCATTGCTCTATCCTACA | |
| TCCGGATTATTATAGTGATTCTGGGAATGCACTCAGCTGAAGGTCATCACAAGGCCTTTTC | |
| CACCTGTGCTGCTCACCTTGCTGTGTTCTTGCTATTTTTTGGCAGTGTGGCTGTCATGTATT | |
| TGAGATTCTCAGCCACCTACTCAGTGTTTTGGGACACAGCAATTGCTGTCACTTTTGTTATC | |
| CTTGCTCCCTTTTTCAACCCCATCATCTATAGCCTGAAAAACAAGGACATGAAAGAGGCTA | |
| TTGGAAGGCTTTTCCACTATCAGAAGAGGGCTGGTTGGGCTGGGAAATAG. | |
| AOLFR221 sequences: | |
| MRNLSGGHVEEFVLVGFPTTPPLQLLFVLFFAIYLLTLLENALIVFTTWLAPSLHRPMYFFLGH | (SEQ ID NO: 413) |
| LSFLELWYINVTIPRLLAAFLTQDGRVSYVGCMTQLYFFIALACTECVLLAVMAYDRYLAICGP | |
| LLYPSLMPSSLATRLAAASWGSGFFSSMMKLLFISQLSYCGPNIINHFFCDISPLLNLTCSDKEQA | |
| ELVDFLLALVMILLPLLAVVSSYTAIIAAILRIPTSRGRHKAFSTCAAHLAVVVIYYSSTLFTYAR | |
| PRAMYTFNHNKIISVLYTIIVPFFNPAIYCLRNKEVKEAFRKTVMGRCHYPRDVQD. | |
| ATGAGAAATTTGAGTGGAGGCCATGTCGAGGAGTTTGTCTTGGTGGGTTTCCCTACCACGC | (SEQ ID NO: 414). |
| CTCCCCTCCAGCTGCTCCTCTTTGTCCTTTTTTTTGCAATTTACCTTCTGACATTGTTGGAGA | |
| ATGCACTTATTGTCTTCACAATATGGCTTGCTCCAAGCCTTCATCGTCCCATGTACTTTTTC | |
| CTTGGCCATCTCTCT1TCCTGGAGCTATGGTACATCAATGTCACCATTCCTCGGCTCTTGGC | |
| AGCCTTTCTTACCCAGGATGGTAGAGTCTCCTACGTAGGTTGCATGACCCAACTGTACTTC | |
| TTTATTGCCTTAGCCTGTACTGAATGTGTGCTGTTGGCAGTTATGGCCTATGATCGCTACCT | |
| GGCCATCTGTGGACCCCTCCTTTACCCTAGTCTCATGCCTTCCAGTCTGGCCACTCGCCTTG | |
| CTGCTGCCTCTTGGGGCAGTGGCTCTTCAGCTCCATGATGAAGCTTCTTTTTATTTCCCAA | |
| TTGTCCTACTGTGGACCCAACATTATCAACCACTTTTTCTGTGATATTTCCCCACTACTCAA | |
| CCTCACCTGCTCTGACAAGGAGCAAGCAGAGCTAGTAGACTTCCTTCTGGCCCTGGTGATG | |
| ATTCTACTCCCTCTATTGGCTGTGGTTTCATCATACACTGCCATCATTGCAGCCATCCTGAG | |
| GATCCCTACGTCCAGGGGACGCCACAAAGCCTTTTCCACTTGTGCCGCTCATCTGGCAGTG | |
| GTTGTTATCTACTACTCCTCCACTCTCTTCACCTATGCACGGCCCCGGGCCATGTACACCTT | |
| CAACCACAACAAGATTATCTCTGTGCTCTACACTATCATTGTACCATTCTTCAACCCAGCCA | |
| TCTACTGCCTGAGGAACAAGGAGGTGAAGGAGGCCTTCAGGAAGACAGTGATGGGCAGAT | |
| GTCACTATCCTAGGGATGTTCAGGACTGA. | |
| AOLFR222 sequences: | |
| MGQTNVTSWRDFVFLGFSSSGELQLLLFALFLSLYLVTLTSNVFIIIAIPIDSHLHTPMYLFLSFL | (SEQ ID NO: 415). |
| SFSETCYTLGIIPRMLSGLAGGDQAISYVGCAAQMFFSASWACTNCFLLAAMGFDRYVAICAPL | |
| HYASHMNPTLCAQLVITSFLTGYLFGLGMTLVIFHLSFCSSHEIQHFFCDTPPVLSLACGDTGPS | |
| ELRIFILSLLVLLVSFFFITISYAYILAAILRIPSAEGQKKAFSTCASHLTVVIIHYGCASFVYLRPK | |
| ASYSLERDQLIAMTYTVVTPLLNPIVYSLRTRAIQTALRNAFRGRLLGKG. | |
| ATGGGGCAGACCAACGTAACCTCCTGGAGGGATTTTGTCTTCCTGGGCTTCTCCAGTTCTG | (SEQ ID NO: 416) |
| GGGAGTTGCAGCTCCTTCTCTTTGCCTTGTTCCTCTCTCTGTATCTAGTCACTCTGACCAGC | |
| AATGTCTTCATTATCATAGCCATCAGGCTGGATAGCCATCTGCACACCCCCATGTACCTCTT | |
| CCTTTCCTTCCTATCCTTCTCTGAGACCTGCTACACTTTGGGCATCATCCCTAGAATGCTCT | |
| CTGGCCTGGCTGGGGGGGACCAGGCTATCTCCTATGTGGGCTGTGCTGCCCAGATGTTCTT | |
| TTCTGCCTCATGGGCCTGTACTAACTGCTTCCTTCTGGCTGCCATGGGCTTTGACAGATATG | |
| TGGCCATCTGTGCTCCACTCCACTATGCCAGCCACATGAATCCTACCCTCTGTGCCCAGCT | |
| GGTCATTACTTCCTTCCTGACTGGATACCTCTTTGGACTGGGAATGACACTAGTTATTTTCC | |
| ACCTCTCATTCTGCAGGTCCCATGAAATCCAGCACTTTTTTTGTGACACGCCACCTGTGCTG | |
| AGCCTAGCGTGTGGAGATACAGGCCGGAGTGAGGTGAGGATCTTTATCCTCAGTCTTTTGG | |
| TCCTCTTGGTCTCCTTCTTCTTCATCACCATCTCCTACGCCTACATCTTGGCAGCAATACTG | |
| AGGATCCCCTCTGCTGAGGGGCAGAAGAAGGCCTTCTCCACTTGTGCCTCGCACCTTACAG | |
| TGGTCATTATTCATTATGGCTGTGCTTCCTTCGTGTACCTGAGGCCCAAAGCCAGCTACTCT | |
| CTTGAGAGAGATCAGCTTATTGCCATGACCTATACTGTAGTGACCCCCCTCCTTAATCCCA | |
| TTGTTTATAGTCTAAGGACTAGGGCTATACAGACAGCTCTGAGGAATGCTTTCAGAGGGAG | |
| ATTGCTGGGTAAAGGATGA. | |
| AOLFR223 sequences: | |
| MEAANESSEGISFVLLGLTTSPGQQRPLEVLFLLLYVASLLGNGLIVAAIQASPALHAPYMYFLLA | (SEQ ID NO: 417) |
| HLSFADLCFASVTVPKMLANLLAHDHSISLAGCLTQMYFFFALGVTDSCLLAAMAYDCYVAIR | |
| HPLPYATRMSRAMCAALVGMAWLVSHVHSLLYILLMARLSFCASHQVPHFFCDHQPLLRLSC | |
| SDTHHIQLLIFTEGAAVVVTPFLLILASYGAIAAAVLQLPSASGRIRAVSTCGSHLAVVSLFYGT | |
| VIAVYFQATSRREAEWGRVATVMYTVVTPMLNPIIYSLWNRDVQGALRALLIGRRISASDS. | |
| ATGGAGGCTGCCAATGAGTCTTCAGAGGGAATCTCATTCGTTTTATTGGGACTGACAACAA | (SEQ ID NO: 418) |
| GTGCTGGACAGCAGCGGCCTCTCTTTGTGCTGTTCTTGCTCTTGTATGTGGCCAGCCTCCTG | |
| GGTAATGGACTCATTGTGGCTGCCATCCAGGCCAGTCCAGCCCTTCATGCACCCATGTACT | |
| TCCTGCTGGCCCACCTGTCCTTTGCTGACCTCTGTTTCGCCTCCGTGACTGTGCCCAAGATG | |
| TTGGCCAACTTGTTGGCCCATGACCACTCCATCTCGCTGGCTGGCTGCCTGACCCAAATGT | |
| ACTTCTTCTTTGCCCTGGGGGTAACTGATAGCTGTCTTCTGGCGGCCATGGCCTATGACTG | |
| CTACGTGGCCATCCGGCACCCCCTCCCCTATGCCACGAGGATGTCCCGGGCCATGTGCGCA | |
| GCCCTGGTGGGAATGGCATGGCTGGTGTCCCACGTCCACTCCCTCCTGTATATCCTGCTCA | |
| TGGCTCGCTTGTCCTTCTGTGCTTCCCACCAAGTGCCCCACTTCTTCTGTGACGACCAGGCT | |
| CTCTTAAGGCTCTCGTGCTCTGACACCCACCACATCCAGCTGCTCATCTTCACCGAGGGCG | |
| CCGGAGTGGTGGTCACTCCCTTCCTGCTCATCCTCGCCTCCTATGGGGCCATCGCAGCTGC | |
| CGTGCTCCAGCTGCCCTCAGCCTCTGGGAGGCTCCGGGCTGTGTCCACCTGTGGCTCCCAC | |
| CTGGCTGTGGTGAGCCTCTTCTATGGGACAGTCATTGCAGTCTACTTCCAGGCGACATCCC | |
| GACGCGAGGCAGAGTGGGGCCGTGTGGCCACTGTCATGTACACTGTAGTCACCCCCATGC | |
| TGAACCCCATCATCTACAGCCTCTGGAATCGCGATGTACAGGGGGCACTCCGAGCCCTTCT | |
| CATTGGGCGAAGGATCTCAGCTAGTGACTCCTGA. | |
| AOLFR224 sequences: | |
| MGSFNTSFEDGFILVGFSDWPQLEPILFVFIFIFYSLTLFGNTIIIALSWLDLRLHTPMYFFLSHLSL | (SEQ ID NO: 419) |
| LDLCFTTSTVPQLLINLCGVDRTITRGGCVAQLFIYLALGSTECVLLVVMAFDRYIAAVCPSLHY | |
| MAIMHPHLCQTLAIASWGAGFVNSLIQTGLAMAMPLCGHPINHFFCEMPVFLKLACADTEGT | |
| EAKMFVARVIVVAVPAALILGSYVHIAHAVLRVKSTAGRRKAFGTCGSHLLVVFLFYGSAIYT | |
| YLQSIHNYSEREGKFVALFYTIITPILNPLIYTLRNKDVKGALWKVLWRGRDSG. | |
| ATGGGAAGTTTCAACACCAGTTTTGAAGATGGCTTCATTTTGGTGGGATTCTCAGATTGGC | (SEQ ID NO: 420) |
| CGCAACTGGAGCCCATCCTGTTTGTCTTTATTTTTATTTTCTACTCCCTAACTCTCTTTGGC | |
| AACACCATCATCATCGCTCTCTCCTGGCTAGACCTTCGGCTGCACACACCTATGTACTTCTT | |
| TCTCTCTCATGTGTCCCTCCTGGACCTCTGCTTCACCACCAGGACCGTGCCCGAGCTCCTGA | |
| TCAACCTTTGCGGGGTGGACCGCACCATCACCCGTGGAGGGTGTGTGGCTCAGCTCTTCAT | |
| CTACCTAGCCCTGGGCTCCACAGAGTGTGTGCTCCTGGTGGTGATGGCCTTTGACCGCTAT | |
| GCTGCTGTCTGTCGTCCACTCCACTACATGGCCATCATGCACCCCCATCTCTGCCAGACCCT | |
| GGCTATCGCCTCCTGGGGTGCGGGTTTCGTGAACTCTCTGATCCAGACAGGTCTCGCAATG | |
| GCCATGCCTCTCTGTGGCCATCGACTGAATCACTTCTTCTGTGAGATGCCTGTATTTCTGAA | |
| GTTGGCTTGTGCGGACACAGAAGGAACAGAGGCCAAGATGTTTGTGGCCCGAGTCATAGT | |
| CGTGGCTGTTCCTGCAGCACTTATTCTAGGCTCCTATGTGCACATTGCTCATGCAGTGCTG | |
| AGGGTGAAGTCAACGGCTGGGCGCAGAAAGGCTTTTGGGACTTGTGGGTCCCACCTCCTA | |
| GTAGTTTTCCTTTTTTATGGCTCAGCCATCTACACATATCTCCAATCCATCCACAATTATTC | |
| TGAGCGTGAGGGAAAATTTGTTGCCCTTTTTTATACTATAATTACCCCCATTCTCAATCCTC | |
| TCATTTATACACTAAGAAACAAGGACGTGAAGGGGGCTCTGTGGAAAGTACTATGGAGGG | |
| GGAGGGACTCAGGGTAG. | |
| AOLFR225 sequences: | |
| MENYNQTSTDFILLGLFPPSIIDLFFFILIVFIFLMALIGNLSMILLIFLDTHLHTPMYFLLSQLSLID | (SEQ ID NO: 421) |
| LNYISTIVPKMASDFLHGNKSISFTGCGIQSFFFLALGGAEALLLASMAYDRYIAICFPLHYLIRM | |
| SKRVCVLMITGSWIIGSINACAHTVYVLHIPYCRSRAINHFFCDVPAMVTLACMDTWVYEGTV | |
| FLSATIFLVFPFIGISCSYGQVLFAVYHMKSAEGRKKAYLTCSTHLTVVTFYYAPFVYTYLRPRS | |
| LRSPTEDKVLAVFYTILTPMLNPIIYSLRNKEVMGALTRVSQRICSVKM. | |
| ATGGAAAATTACAATCAAACATCAACTGATTTCATCTTATTGGGGCTGTTTCCACCATCAA | (SEQ ID NO: 422) |
| TAATTGACCTTTTGTTCTTCATTCTCATTGTTTTCATTTTCCTGATGGCTCTAATTGGAAACC | |
| TGTCCATGATTCTTCTCATCTTCTTGGACACCCATCTCCACACACCCATGTATTTCCTACTG | |
| AGTCAGCTCTGCCTCATTGACCTAAATTACATCTCCACCATTGTTCCTAAGATGGCATCTGA | |
| TTTTCTGCATGGAACAAGTCTATCTCCTTCACTGGGTGTGGGATTCAGAGTTTCTTCTTCT | |
| TGGCATTAGGAGGTGCAGAAGCACTACTTTTGGCATCTATGGCCTATGATCGTTAGATTGC | |
| TATTTGCTTTCCTCTCCACTATCTCATCCGCATGAGCAAAAGAGTGTGTGTGCTGATGATA | |
| ACAGGGTCTTGGATCATAGGCTCGATCAATGCTTGTGCTCACACTGTATATGTACTCCATA | |
| TTCCTTATTGCCGATCCAGGGCCATCAATCATTTCTTCTGTGATGTCCCAGCAATGGTGACT | |
| CTGGCCTGCATGGACACCTGGGTCTATGAGGGCACAGTGTTTTTGAGTGCCACCATCTTTC | |
| TCGTGTTTCCCTTCATTGGTATTTCATGTTCCTATGGCCAGGTTCTCTTTGCTGTCTACCAC | |
| ATGAAATCTGCAGAAGGGAGGAAGAAAGCCTATTTGACCTGCAGCACCCACGTCACTGTA | |
| GTAACTTTCTACTATGCACCTTTTGTCTACACTTATCTACGTCCAAGATCCCTGCGATCTCC | |
| AACAGAGGACAAGGTTCTGGCTGTCTTCTACACCATCCTCACCCCAATGCTCAACCCCATC | |
| ATCTATAGCCTGAGGAACAAGGAGGTGATGGGGGCCCTGACACGAGTGAGTCAGAGAATC | |
| TGGTCTGTGAAAATGTAG. | |
| AOLFR226 sequences: | |
| MEWRNHSGRVSEFVLLGFPAPAPLQVLLFALLLLAYVLVLTENTLIMAIRNHSTLHKPMYFFL | (SEQ ID NO: 423) |
| ANMSFLEIWYVTVTIPKMLAGFVGSKQDHGQLISFEGCMTQLYFFLGLGCTECVLLAVMAYD | |
| RYMAICYPLHYPVIVSGRLCVQMAAGSWAGGFGISMVKVFLISGLSYCGPNIIHFFCDVSPLL | |
| NLSCTDMSTAELTDFILAIFILLGPLSVTGASYVAITGAVMHISSAAGRYKAFSTCASHLTVVIIF | |
| YAASIFIYARPKALSAFDTNKLVSVLYAVIVPLLNPIIYCLRNQEVKRALCCTLHLYQHQDPDP | |
| KKASRNV. | |
| ATGGAGTGGCGGAACCATAGTGGGAGAGTGAGTGAGTTTGTGTTGCTGGGCTTCCCTGCT | (SEQ ID NO: 424) |
| CCTGCGCCACTACAGGTACTATTGTTTGCCCTTTTGCTGCTGGCGTATGTGTTGGTGCTGAC | |
| TGAGAACACACTCATCATTATGGGAATTAGGACCATTCTACCCTCCACAAACCCATGTAC | |
| TTTTTTCTAGCTAATATGTCCTTTCTGGAGATCTGGTATGTCACTGTCACTATTCCCAAGAT | |
| GCTTGCTGGCTTTGTTGGATCCAAACAGGATCATGGACAGCTAATCTCCTTTGAGGGATGC | |
| ATGACACAGCTCTACTTTTTCCTTGGCTTGGGCTGCACTGAGTGTGTCCTTCTCGCTGTTAT | |
| GGCCTATGATCGCTATATGGCCATCTGCTATCCTCTCCACTACCCAGTCATTGTCAGTGGCC | |
| GGCTGTGTGTGCAGATGGCTGCTGGCTCTTGGGCTGGAGGTTTTGGCATCTCCATGGTCAA | |
| AGTTTTTCTTATTTCTGGCCTCTCTTACTGTGGCCCCAACATCATCAACCACTTTTTCTGTG | |
| ATGTCTCTCCATTGCTCAACCTCTCATGCACTGATATGTCCACAGCAGAGCTTACAGATTTC | |
| ATCCTGGCCATTTTTATTCTTCTAGGGCCACTCTCTGTCACTGGGGCCTCCTATGTGGCCAT | |
| TACTGGTGCTGTGATGCACATATCTTCGGCTGCTGGACGCTATAAGGCCTTTTCCACCTGT | |
| GCCTCTCATCTCACTGTTGTGATAATCTTCTATGCAGCCAGTATCTTCATCTATGCTCGGGC | |
| AAAGGCACTCTCAGCTTTTGACACCAACAAGTTGGTCTCTGTACTGTATGCTGTCATTGTA | |
| CCATTGCTCAATCCCATCATTTACTGCCTGCGCAATCAAGAGGTCAAGAGAGCCCTATGCT | |
| GTACTCTGCACCTGTACCAGCACCAGGATCCTGACCCCAAGAAAGCTAGCAGAAATGTATA | |
| G. | |
| AOLFR227 sequences: | |
| MEPQNTSTVTNFQLLGFQNLLEWQALLFVIFLLIYCLTIIGNVVIITVVSQGLRLHSPMYMFLQH | (SEQ ID NO: 425) |
| LSFLEVWYTSTTVPLLLANLLSWGQAISFSACMAQLYFFVFLGATECFLLAYMAYDRYLAICSP | |
| LRYPFLMHRGLCARLVVVSWCTGVSTGFLHSMMISRLDFCGRNQTNHFFCDLPPLMQLSCSRV | |
| YITEVTIFILSIAVLCICFFLTLGPYVFIVSSILRIPSTSGRRKTFSTCGSHLAVVTLYYGTMISMYV | |
| CPSPHLLPEINKIISVFYTVVTPLLNPVIYSLRNKDFKEAVRKVMRRKCGILWSTSKRKF | |
| LY. | |
| ATGGAGCCCCAAAATACCTCCACTGTGACTAACTTTCAGCTGTTAGGATTCCAGAACCTTC | (SEQ ID NO: 426) |
| TTGAATGGCAGGCCCTGCTCTTTGTCATTTTGCTGCTCATCTACTGCCTGAGCATTATAGGG | |
| AATGTTGTCATCATCACCGTGGTGAGCCAGGGCCTGCGACTGCACTCCCCTATGTACATGT | |
| TCCTCCAGCATCTCTCCTTTCTGGAGGTCTGGTACACGTCCACGACTGTGCCCCTTCTCCTA | |
| GGCAACCTGCTGTCCTGGGGCCAAGCCATCTCCTTCTCTGCCTGCATGGCACAGCTCTACT | |
| TCTTCGTATTCCTCGGGGCCACCGAGTGCTTTCTCCTGGCCTTCATGGCCTATGACCGTTAC | |
| CTGGCCATCTGCAGCCCACTCCGCTACCCCTTTCTCATGCATCGTGGGCTATGTGCCAGGTT | |
| GGTGGTGGTCTCATGGTGCACAGGGGTCAGGACAGGCTTTCTGCATTCCATGATGATTTCC | |
| AGGTTGGACTTCTGTGGGCGCAATCAGATTAACCATTTCTTCTGCGACCTCCCGCCACTGA | |
| TGCAGCTCTCCTGTTCCAGAGTTTATATCACCGAGGTGACCATCTTCATCCTGTCAATTGCG | |
| GTGCTGTGCATTTGTTTTTTTCTGACACTGGGGCCCTATGTTTTCATTGTGTCCTCCATATT | |
| GAGAATCCCTTCCACCTCTGGCCGGAGAAAGACCTTTTTCCACATGTGGCTCCCACCTGGCT | |
| GTTGTCACTCTCTACTACGGGACCATGATCTCCATGTATGTGTGTCCCAGTCCCCACCTGTT | |
| GCCTGAAATCAACAAGATCATTTCTGTCTTCTACACTGTGGTCACACCACTGGTGAACCCA | |
| GTTATCTACAGCTTGAGGAACAAAGACTTCAAAGAAGCTGTTAGAAAGGTCATGAGAAGG | |
| AAATGTGGTATTCTATGGAGTACAAGTAAAAGGAAGTTCCTTTATTAG. | |
| AOLFR229 sequences: | |
| MFYVNQIPFQLYHISFVYPTELWSRAIIPCMPTLSFWVCSATPVSPGFFALILLVFVTSIASNVVK | (SEQ ID NO: 427) |
| IILIHIDSRLHTPMYFLLSQLSLRDILYISTIVPKMLVDQVMSQRAISFAGCTAQHFLYLTLAGAE | |
| FFLLGLMSCDRYVAICNPLHYPDLMSRKICWLIVAAAWLGGSIDGFLLTPVTMQFPFCASREIN | |
| HFFCEVPALLKLSCTDTSAYETAMYVCCIMMLLIPFSVISGSYTRILITVYRMSEAEGRRKAVAT | |
| CSSHMVVVSLFYGAAMYTYVLPHSYHTPEQDKAVSAFYTILTPMLNPLIYSLRNKDVTGALQK | |
| VVGRCVSSGKVTTF. | |
| ATGTTTTATGTAAATCAGATACCTTTCCAACTTTATCATATCTCTTTGGTGTACCCTACAGA | (SEQ ID NO: 428) |
| GCTATGGAGCAGAGCAATTATTCCGTGTATGCCGACTTTATCCTTCTGGGTTTGTTCAGCA | |
| ACGCCCGTTTCCCCTGGCTTCTTTGCCCTCATTCTCCTGGTCTTTGTGACCTCCATAGCCAG | |
| CAACGTGGTGAAGATCATTCTCATCCACATAGACTCCCGCCTCCACAGCCCCATGTACTTC | |
| CTGCTCAGCCAGCTCTCCCTCAGGGACATCCTGTATATTTCCAGCATTGTGCCCAAAATGCT | |
| GGTCGACCAGGTGATGAGCCAGAGAGCCATTTCCTTTGCTGGATGCACTGCCCAACACTTC | |
| CTCTACTTGACCTTAGCAGGGGCTGAGTTCTTCCTCCTAGGACTCATGTCCTGTGATCGCTA | |
| CGTAGCCATCTGCAACCCTCTGCACTATCCTGACCTCATGAGCCGCAAGATCTGCTGGTTG | |
| ATTGTGGCGGCAGCCTGGCTGGGAGGGTCTATCGATGGTTTCTTGCTCACCCCCGTCACCA | |
| TGCAGTTCCCCTTCTGTGCGTCTCGGGAGATCAACCACTTGTTCTGCGAGGTGCCTGGCCTT | |
| CTGAAGCTCTCCTGCACGGACACATCAGCCTACGAGACAGCCATGTATGTCTGCTGTATTA | |
| TGATGCTCCTCATCCCTTTCTCTGTGATCTCGGGCTCTTACACAAGAATTCTCTTACTGTT | |
| TATAGGATGAGCGAGGCAGAGGGGAGGCGAAAGGCTGTGGCCACCTGCTCCTCACACATG | |
| GTGGTTGTCAGCCTCTTCTATGGGGCTGCCATGTACACATACGTGCTGCCTCATTCTTACCA | |
| CACCCCTGAGCAGGACAAAGCTGTATCTGCCTTCTACACCATCCTCACTCCCATGCTCAAT | |
| CCACTCATTTACAGCCTTAGGAACAAGGATGTCACGGGGGCCCTACAGAAGGTTGTTGGG | |
| AGGTGTGTGTGCTCAGGAAAGGTAACCACTTTCTAA. | |
| AOLFR230 sequences: | |
| MGMEGLLQNSTNFVLTGLITHPAFPGLLFAIVFSIFVVAITANLVMILLIHMDSRLHTPMYFLLS | (SEQ ID NO: 429) |
| QLSIMDTIYICITVPKMLQDLLSKDKTISFLGCAVQIFLYLTLIGGEFFLLGLMAYDRYVAVCNP | |
| LRYPLLMNRRVCLFMVVGSWVGGSLDGFMLTPVTMSFPFCRSREINHFFCEIPAVLKLSCTDTS | |
| LYETLMYACGVLMLLIPLSVISVSYTHILLTVHRMNSAEGRRKAFATCSSHIMVVSVFYGAAFY | |
| TNVLPHSYHTPEKDKVVSAFYTILTPMLNPLIYSLRNKDVAAALRKVLGRCGSSQSIRVATVIR | |
| KG. | |
| ATGGGCATGGAGGGTCTTCTCCAGAACTCCACTAACTTCGTCCTCACAGGCCTCATCACCC | (SEQ ID NO: 430) |
| ATCCTGCCTTCCCCGGGCTTCTCTTTGCAATAGTGTTCTCCATCTTTGTGGGTGGCTATAACA | |
| GCCAAGTTGGTCATGATTCTGCTCATCCACATGGACTCCCGCCTCCACACACCCATGTACTT | |
| CTTGCTCAGCCAGCTCTCCATCATGGATACCATCTACATCTGTATCACTGTCCCCAAGATGC | |
| TCCAGGACCTGCTGTCCAAGGACAAGACCATTTCCTTCCTGGGCTGTGCAGTTCAGATCTT | |
| CCTCTACCTGACCCTGATTGGAGGGGAATTCTTGCTGGTGGGTCTCATGGCCTATGACCGG | |
| TATGTGGCTGTGTGCAACCCTCTACGGTACCCTCTCCTCATGAACCGCAGGGTTTGCTTATT | |
| CATGGTGGTCGGCTCCTGGGTTGGTGGTTCCTTGGATGGGTTCATGCTGACTCCTGTCACT | |
| ATGAGTTTCCCCTTCTGTAGATCCCGAGAGATCAATCACTTTTTCTGTGAGATCCCAGCCGT | |
| GCTGAAGTTGTCTTGCACAGACACGTCACTCTATGAGACCCTGATGTATGCCTGCTGCGTG | |
| CTGATGCTGCTTATCCCTCTATCTGTCATCTCTGTCTCCTACACGCACATCCTCCTGACTGT | |
| CCACAGGATGAACTCTGCTGAGGGCCGGCGCAAAGCCTTTGCTAGGTGTTCCTCCCACATT | |
| ATGGTGGTGAGCGTTTTCTACGGGGCAGCCTTCTACACCAACGTGCTGCCCCACTCCTACC | |
| ACACTCCAGAGAAAGATAAAGTGGTGTCTGCCTTCTACACCATGCTCACCCCCATGCTCAA | |
| CCCACTCATCTACAGCTTGAGGAATAAAGATGTGGCTGCAGCTCTGAGGAAAGTACTAGG | |
| GAGATGTGGTTCCTCCCAGAGCATCAGGGTGGCGACTGTGATCAGGAAGGGCTAG. | |
| AOLFR231 sequences: | |
| MERANHSVVSEFILLGLSKSQNLQILFFLGFSVVFVGIVLGNLLILVTVTFDSLLHTPMYFLLSNL | (SEQ ID NO: 431) |
| SCIDMILASFATPKMIVDFLRERKTISWWGCYSQMFFMHLLGGSEMMLLVAMAIDRYVAICKP | |
| LHYMTIMSPRVLTGLLLSSYAVGFVHSSSQMAFMLTLPFCGPNVIDSFFCDLPLVIKLACKDTYI | |
| LQLLVIADSGLLSLVCFLLLLVSYGVHFSVRYRAASRSSKAFSTLSAHITVVTLFFAPCVFIYVW | |
| PFSRYSVDKILSVFYTIFTPLLNPHYTLRNQEVKAAIKKRICI. | |
| ATGGAAAGAGCAAACCATTCAGTGGTATCGGAATTTATTTTGTTGGGACTTTCCAAATCTG | (SEQ ID NO: 432) |
| AAAATCTTCAGATTTTATTCTTCTTGGGATFCTCTGTGGTCTTCGTGGGGATTGTGTTAGGA | |
| AACCTGCTCATCTTGGTGACTGTGACCTTTGATTCGCTCCTTCACACACCAATGTATTTTCT | |
| GCTTAGCAACCTCTCCTGCATTGATATGATCCTGGCTTCTTTTGCTACCCCTAAGATGATTG | |
| TAGATTTCCTCCGAGAACGTAAGACCATCTCATGGTGGGGATGTTATTCCCAGATGTTCTT | |
| TATGCACCTCGTGGGTGGGAGTGAGATGATGTTGCTTGTAGCCATGGCAATAGACAGGTAT | |
| GTTGCCATATGCAAACCCCTCCATTAGATGACCATCATGAGCCCACGGGTGCTCACTGGGC | |
| TACTGTTATCCTCCTATGCAGTTGGATTTGTGCACTCATCTAGTCAAATGGCTTTCATGTTG | |
| ACTTTGCGCTTCTGTGGTCCCAATGTTATAGACAGCTTTTTCTGTGACCTTCCCGTTGTGAT | |
| TAAACTTGCCTGCAAGGACACCTACATCCTACAGCTCCTGGTCATTGCTGACAGTGGGGTC | |
| CTGTCACTGGTCTGCTTCCTCCTCTTGCTTGTCTCCTATGGAGTCATAATATTCTCAGTTAG | |
| GTACCGTGCTGCTAGTCGATCCTGTAAGGCTTTCTCCACTCTCTCAGCTCACATCACAGTTG | |
| TGACTCTGTTCTTTGCTCCGTGTGTCTTTATCTACGTCTGGCCCTTCAGCAGATACTCGGTA | |
| GATAAAATTCTTTCTGTGTITTTACACAATTTTCACACCTCTCTTAAATCCTATTATTTATAC | |
| ATTAAGAAATCAAGAGGTAAAAGCAGCCATTAAAAAAAGACTCTGCATATAA. | |
| AOLFR232 sequences: | |
| MDNITWMASHTGWSDFILMGLFRQSKHPMANITWMANHTGWSDFILLGLFRQSKHPALLCV | (SEQ ID NO: 433) |
| VIFVVFLMALSGNAVLILLIHCDAHLHTPMYFFISQLSLMDMAYISVTVPKIVILLDQVMGVNKIS | |
| APECGMQMFFYVTLAGSEFFLLATMAYDRYVAICHPLRYPVLMNHRVCLFLSSGCWFLGSVD | |
| GFTFTPITMTFPFRGSREIHHFFCEVPAVLNLSCSDTSLYEIFMYLCCVLMLLIPVVIISSSYLLILL | |
| TLHGMNSAEGRKKAFATCSSHLTVVILFYGAAIYTYMLPSSYHTPEKDMMVSVFYTILTPVVNP | |
| LIYSLRNKDVMGALKXMLTVEPAFQKAME. | |
| ATGGACAACATCACCTGGATGGCCAGCCACACTGGATGGTCGGATTTCATCCTGATGGGAC | (SEQ ID NO: 434) |
| TCTTCAGACAATCCAAACATCCAATGGCCAATATCACCTGGATGGCCAACCACACTGGATG | |
| GTCGGATTTCATCCTGTTGGGACTCTTCAGACAATCCAAACATCCAGCACTACTTTGTGTG | |
| GTCATTTTTGTGGTTTTCCTGATGGCGTTGTCTGGAAATGCTGTCCTGATCCTTCTGATACA | |
| CTGTGACGCCCAGCTCCACACCCCCATGTACTTTTTCATCAGTCAATTGTCTCTCATGGACA | |
| TGGCGTACATTTCTGTCACTGTGCCCAAGATGCTCCTGGACCAGGTCATGGGTGTGAATAA | |
| GATCTCAGCCCCTGAGTGTGGGATGCAGATGTTCTTCTACGTGACACTAGGAGGTTCAGAA | |
| TTTTTCCTTCTAGCCACCATGGCCTATGACCGCTACGTGGCCATCTGCCATCCTCTCCGTTA | |
| CCCTGTCCTCATGAACCATAGGGTGTGTCTCTTCGTGTCATCAGGCTGCTGGTTCCTGGGCT | |
| CAGTGGATGGCTTCACATTCACTCCCATCACCATGACCTTCCCCTTCCGTGGATCCCGGGA | |
| GATTCATCATTTCTTCTGTGAAGTTCCTGCTGTATTGAATCTCTCCTGCTCAGACACCTCAC | |
| TCTATGAGATTTFFCATGTACTTGTGCTGTGTCCTCATGCTCCTCATCCCTGTGGTGATCATT | |
| TCAAGCTCCTATTTACTCATCCTCCTCACCATCCACGGGATGAACTCAGCAGAGGGCCGGA | |
| AAAAGGCCTTTGCCACCTGCTCCTCCCACCTGACTGTGGTCATCCTCTTCTATGGGGCTGCC | |
| ATCTACACCTACATGCTCCCCAGCTCCTACCACACCCCTGAGAAGGACATGATGGTATCTG | |
| TCTTCTATACCATCCTCACTCCAGTGGTGAACCCTTTAATCTATAGTCTTAGGAATAAGGAT | |
| GTCATGGGGGCTCTGAAGAAAATGTTAACAGTGGAACCTGCCTTTCAAAAAGCTATGGAG | |
| TAG. | |
| AOLFR233 sequences: | |
| MANITRMANIITGKLDFILMGLFRRSKHPALLSVVIFVVFLKALSGNAVLILLIHCDAHLHSPMY | (SEQ ID NO: 435) |
| FFISQLSLMDMAYISVTVPKMLLDQVMGVNKVSAPECGMQMFLYLTLAGSEFFLLATMAYDR | |
| YVAICHPLRYPVLMMIRVCLFLASGCWFLGSVDGFMLTPITMSFPFCRSWEIHHFFCEVPAVTI | |
| LSCSDTSLYETLMYLCCVLMLLIPVTflSSSYLLILLTVHRMNSAEGRKKAFATCSSHLTVVILFY | |
| GAAVYTYMLPSSYHTPEKDMMVSVFYTILTPVLNPLIYSLRMGDVMGALKKMLTVRFVL. | |
| ATGGCCAACATCACCAGGATGGCCAACCACACTGGAAAGTTGGATTTCATCCTCATGGGAC | (SEQ ID NO: 436) |
| TCTTCAGACGATCCAAACATCCAGGTCTACTTAGTGTGGTCATCTTTGTGGTTTTCCTGAAG | |
| GCGTTGTCTGGAAATGCTGTCCTGATCCTTCTGATACACTGTGACGCCCACCTCCACAGCC | |
| CCATGTACTTTTTCATCAGTCAATTGTCTCTCATGGACATGGCGTACATTTCTGTCACTGTG | |
| CCCAAGATGCTCCTGGACCAGGTCATGGGTGTGAATAAGGTCTCAGGCCCTGAGTGTGGG | |
| ATGCAGATGTTCCTCTATCTGACACTAGCAGGTTCGGAATTTTTCCTTCTAGCCACCATGGC | |
| CTATGACCGCTACGTGGCCATCTGCCATCCTCTCCGTTACCCTGTCCTCATGAACCATAGG | |
| GTCTGTCTTTTCCTGGCATCGGGCTGCTGGTTCCTGGGCTCAGTGGATGGCTTCATGCTCAC | |
| TCCCATCACCATGAGCTTCCCCTTCTGCAGATCCTGGGAGATTCATCATTTCTTCTGTGAAG | |
| TGCCTGCTGTAACGATCCTGTCCTGCTCAGACACCTCACTCTATGAGACCCTCATGTACCTA | |
| TGCTGTGTCCTCATGCTCCTCATGCCTGTGACGATCATTTGAAGCTCCTATTTACTCATCCT | |
| CCTCACCGTCGACAGGATGAACTCAGCAGAGGGCCGGAAAAAGGCCTTTGCCACCTGCTC | |
| CTGCCACCTGACTGTGGTCATCCTCTTCTATGGGGCTGCCGTCTACACCTAGATGCTCCCCA | |
| GCTCCTACCACACCCCTGAGAAGGACATGATGGTATCTGTCTTCTATACGATCCTCACTCC | |
| GGTGCTGAACCCTTTAATCTATAGTCTTAGGAATAAGGATGTCATGGGGGCTCTGAAGAAA | |
| ATGTTAACTGTGAGATTCGTGCTTTAG. | |
| AOLFR234 sequences: | |
| MPNSTTVMEFLLMRFSDVWTLQILHSASFFMLYLVTLMGNILIVTVTTCDSSLHMPMYFFLRN | (SEQ ID NO: 437) |
| LSILDACYISVTVPTSCVNSLLDSTTISKAGCVAQVFLVVFFVYVELLFLTIMAHDRYVAVCQPL | |
| HYPVLVNSRICIQMTLASLLSGLVYAGMHTGSTFQLPFCRSNVIHQFFCDIPSLLKLSCSDTFSNE | |
| VMIVVSALGVGGGCFIFIIRSYIHIFSTVLGFPRGADRTKAFSTCIPHILVVSVFLSSCSSVYLRPP | |
| AIPAATQDLILSGFYSIMPPLFNPIIYSLRNKQIKVAIKKIMKRIFYSENV. | |
| ATGCCCAATTCAACCACCGTGATGGAATTTCTCCTCATGAGGTTTTCTGATGTGTGGACAC | (SEQ ID NO: 438) |
| TACAGATTTTACATTCTGCATCCTTCTTTATGTTGTATTTGGTAACTCTAATGGGAAACATC | |
| CTCATTGTGACCGTCACCACCTGTGACAGCAGGCTTCACATGCCCATGTACTTCTTCCTCAG | |
| GAATCTGTCTATCTTGGATGCCTGCTACATTTCTGTTACAGTCCCTACCTCATGTGTCAATT | |
| CCCTACTGGACAGCACCACCATTTCTAAGGCGGGATGTGTAGCTCAGGTCTTCCTCGTGGT | |
| TTTTTTTGTATATGTGGAGCTTCTGTTTCTCACCATTATGGCTCATGACCGCTATGTGGCTG | |
| TCTGCCAGCCACTTCACTACCCTGTGATCGTGAACTCTCGAATCTGCATCCAGATGACACT | |
| GGCCTCCCTACTCAGTGGTCTTGTCTATGCAGGCATGCACACTGGCAGCACATTCCAGCTG | |
| CCCTTCTGTCGGTCCAACGTTATTCATCAATTCTTCTGTGACATCCCCTCTCTGCTGAAGCT | |
| CTCTTGCTCTGACACCTTCAGCAATGAGGTCATGATTGTTGTCTCTGCTCTGGGGGTAGGT | |
| GGCGGCTGTTTCATCTTTATCATCAGGTCTTACATTCACATCTTTTCGACCGTGCTCGGGTT | |
| TCCAAGAGGAGCAGACAGAACAAAGGCCTTTTCCACCTGCATCCCTCACATCCTGGTGGTG | |
| TCAGTCTTCCTCAGTTCATGCTCTTCTGTGTACCTCAGGCCACCTGCGATACCTGCAGCCAC | |
| CCAGGATCTGATCCTTTCTGGTTTTTATTCCATAATGCCTCCCCTCTTTAACCCTATTATTTA | |
| CAGTCTTAGAAATAAGCAAATAAAGGTGGCCATCAAGAAAATCATGAAGAGAATTTTTTA | |
| TTCAGAAAATGTGTAA. | |
| AOLFR235 sequences: | |
| MDGVNDSSLQGFVLMGISDHPQLEMIFFIAILFSYLLTLLGNSTIILLSRLEARLHTPMYFFLSNL | (SEQ ID NO: 439) |
| SSLDLAFATSSVPQMLINLWGPGKTISYGGCITQLYVFLWLGATECILLVVMAFDRYVAVCRPL | |
| RYTAIMNPQLCWLLAVIACLGGLGNSVIQSTFTLQLPLCGHRRVEGFLCEVPAMIKLACGDTSL | |
| NQAVLNGVCTFFTAVPLSIIVISYCLIAQAVLKIRSAEGRRKAFNTCLSHLLVVFLFYGSASYGY | |
| LLPAKNSKQDQGKFISLFYSLVTPMVNPLIYTLRNMEVKGALRRLLGKGREVG. | |
| ATGGACGGGGTGAATGATAGCTCCTTGCAGGGCTTErGTTCTGATGGGCATATCAGACCATC | (SEQ ID NO: 440) |
| CCCAGCTGGAGATGATCTTTTTTATAGCCATCCTCTTCTCCTATTTGCTGACCCTACTTGGG | |
| AACTCAACGATCATCTTGCTTTCCCGCCTGGAGGGCCGGCTCCATACACCCATGTACTTCTT | |
| CCTCAGCAACCTCTCCTCCTTGGACCTTGCTTTCGCTACTAGTTCAGTCCCCCAAATGCTGA | |
| TCAATTTATGGGGACCAGGCAAGACCATCAGCTATGGTGGCTGCATAACCCAGCTCTATGT | |
| CTTCCTTTGGCTGGGGGCCACCGAGTGCATCCTGCTGGTGGTGATGGCATTTGACCGCTAC | |
| GTGGCAGTGTGCCGGCCCCTCCGCTACACCGCCATCATGAACCGCCAGCTCTGCTGGCTGC | |
| TGGCTGTGATTGCCTGCCTGGGTGGCTTGGGCAACTCTGTGATCCAGTCAACATTCACTCT | |
| GCAGCTCCCATTGTGTGGGCACCGGAGGGTGGAGGCATTCCTCTGCGAGGTGCCTGCCAT | |
| GATCAAACTGGCCTGTGGCGACACAAGTCTCAACCAGGCTGTGGTCAATGGTGTCTGCACC | |
| TTCTTCACTGCAGTCCCACTAAGCATCATCGTGATGTCCTACTGCCTCATTGCTCAGGCAGT | |
| GCTGAAAATCCGCTCTGCAGAGGGGAGGCGAAAGGCGTTCAATACGTGCCTCTCCCATCT | |
| GCTGGTGGTGTTCCTCTTCTATGGCTCAGCCAGCTATGGGTATCTGCTTCCGGCCAAGAAC | |
| AGCAAACAGGACCAGGGCAAGTTCATTTCCCTGTTCTACTCGTTGGTCACACCCATGGTGA | |
| ATCCCCTCATCTACACGCTGGGGAACATGGAAGTGAAGGGCGCACTGAGGAGGTTGCTGG | |
| GGAAAGGAAGAGAAGTTGGCTGA. | |
| AOLFR236 sequences: | |
| MTSQERDTAIYSINVSFVAKGMTSRSVCEKMTMTTENPNQTVVSHFFLEGLRYTAKHSSLFFL | (SEQ ID NO: 441) |
| LFLLIYSITVAGNLLILLTVGSDSHLSLPMYHFLGHLSFLDACLSTVTVPKVMAGLLTLDGKVIS | |
| FEGCAVQLYCFHFLASTECFLYTVMAYDRYLAICQPLHYPVAMNRRMCAEMAGITWAIGATH | |
| AAIHTSLTFRLLYCGPCHIAYFFCDIPPVLKLACTDTTINELVMLASIGIVAAGCLILIVISYIFIVA | |
| AVLRIRTAQGRQRAFSPCTAQLTGVLLYYVPPVCIYLQPRSSEAGAGAPAVFYTIVTPMLNPFIY | |
| TLRNKEVKHALQRLLCSSFRESTAGSPPP. | |
| ATGACATCTCAGGAAAGGGATACAGCTATTTATTCCATTAATGTCAGTTTTGTTGCAAAGG | (SEQ ID NO: 442) |
| GGATGACTAGCCGCTCTGTGTGTGAGAAGATGACCATGACAACGGAGAACCCCAACCAGA | |
| CTGTGGTGAGCCACTTCTTCCTGGAGGGTTTGAGGTACACCGCTAAACATTCTAGCCTCTT | |
| CTTCCTCCTCTTCCTCCTCATCTACAGCATCACTGTGGCTGGGAATCTCCTCATCCTCCTAA | |
| CTGTGGGCTCTGACTCTCACCTCAGCTTACCCATGTACCACTTCCTGGGGCACCTCTCCTTC | |
| CTGGATGCCTGTTTGTCTAGAGTGACAGTGCCCAAGGTCATGGCAGGGCTGCTGACTCTGG | |
| ATGGGAAGGTGATCTCCTTTGAGGGCTGTGCCGTACAGCTTTATTGCTTCCACTTTCTGGC | |
| CAGCACTGAGTGCTTCCTGTACACAGTCATGGCCTATGACCGCTATCTGGCTATCTGTCAA | |
| CCCCTGCACTACCCAGTGGCCATGAACAGAAGGATGTGTGCAGAAATGGCTGGAATCACC | |
| TGGGCCATAGGTGCCACGCACGCTGCAATCCACACCTCCCTCACCTTCCGCCTGCTCTACT | |
| GTGGGCCTTGCCACATTGCCTACTTCTTCTGCGACATACCCCCTGTCCTAAAGCTCGCCTGT | |
| ACAGACACCACCATTAATGAGCTAGTCATGCTTGCCAGCATTGGCATCGTGGCTGCAGGCT | |
| GCCTCATCCTCATCGTTATTTCCTACATCTTCATCGTGGCAGCTGTGTTGCGCATCCGCACA | |
| GCCCAGGGCCGGCAGCGGGCCTTCTCCCCCTGCACTGCCCAGCTCACTGGGGTGCTCCTGT | |
| ACTACGTGCCACCTGTCTGTATCTACCTGCAGCCTCGCTCCAGTGAGGCAGGAGCTGGGGC | |
| CCCTGCTGTCTTCTACACAATCGTAACTCCAATGCTCAACCCATTCATTTAGACTTTGCGGA | |
| ACAAGGAGGTGAAGCATGCTCTGCAAAGGCTTTTGTGCAGCAGCTTCCGAGAGTCTACAG | |
| CAGGCAGCCCACCCCCATAG. | |
| AOLFR237 sequences: | |
| MDQRNYTRVKEFTFLGITQSRELSQVLFTFLFLVYMTTLMGNFLIMVTVTCESHLHTPMYFLL | (SEQ ID NO: 443) |
| RNLSILDICFSSITAPKVLIDLLSETKTISFSGCVTQMFFFHLLGGADVFSLSVMAFDRYIAISKPL | |
| HYMTIMSRGRCTGLIVGFLGGGLVHSIAQISLLLPLPVCGPNVLDTFYCDVPQVLKLACTDTFT | |
| LELLMISNNGLVSWFVFFFLLISYTVILMMLRSHTGEGRRKAISTCTSHITVVTLHFVPCIYVYA | |
| RPFTALPTDTAISVTFTVISPLLNPIIYTLRNQEMKLAMRKLKRRLGQSERILIQ. | |
| ATGGATCAGAGAAATTACACCAGAGTGAAAGAATTTACCTTCCTGGGAATTACTCAGTCCC | (SEQ ID NO: 444) |
| GAGAACTGAGCCAGGTCTTATTTACCTTCGTGTTTTTGGTGTACATGACAACTCTAATGGG | |
| AAACTTCCTCATCATGGTTACAGTTACCTGTGAATCTCACCTTCATACGCCCATGTACTTCC | |
| TGCTCCGCAACCTGTCTATTCTTGACATCTGCTTFTCCTCCATCACAGCTCCTAAGGTCCTG | |
| ATAGATCTTCTATCAGAGACAAAAACCATCTCCTTCAGTGGCTGTGTCACTCAAATGTTCT | |
| TCTTCCACCTTCTGGGGGGAGCAGACGTTTTTTCTCTCTCTGTGATGGCGTTTGACCGCTAT | |
| ATAGCCATCTCCAAGCCCCTGCACTATATGACCATCATGAGTAGGGGGCGATGCACAGGCC | |
| TCATCGTGGGCTTCCTGGGTGGGGGGCTTGTCCAGTCCATAGCGCAGATTTCTCTATTGCT | |
| CCCACTCCCTGTCTGTGGACCCAATGTTCTTGACACTTTCTACTGCGATGTCCCCCAGGTCC | |
| TCAAACTTGCCTGCACTGACACGTTCACTCTGGAGCTCCTGATGATTTCAAATAATGGGTT | |
| AGTCAGTTGGTTTGTATTCTTCTTTCTCCTCATATCTTACACGGTCATCTTGATGATGCTGA | |
| GGTCTCACACTGGGGAAGGCAGGAGGAAAGCCATCTCCACCTGCACCTCCCACATCACCG | |
| TGGTGACCCTGCATTTCGTGGCCTGCATCTATGTCTATGCCCGGCCCTTCACTGCCCTCCCC | |
| ACAGACAGTGCCATCTCTGTCACCTTCACTGTCATCTCCCCTTTGCTCAATCCTATAATTTA | |
| CACGCTGAGGAATCAGGAAATGAAGTTGGCCATGAGGAAACTGAAGAGACGGCTAGGAC | |
| AATCAGAAAGGATTTTAATTCAATAA. | |
| AOLFR238 sequences: | |
| MAPENFTRVTEFILTGVSSCPELQIPLFLVFLVLYVLTMAGNLGIITLTSVDSRLQTPMYFFLRHL | (SEQ ID NO: 445) |
| AIINLGNSTVIAPKMLMNFLXTKKKTTSFYECATQLGGFLFFIVSEVMMLAVMAYDRYVAICNP | |
| LLYMVVVSRRLCLLLVSLTYLYGFSTAIVVSPCWSVSYCSSNHNHFYCDIAPLLALSCSDTYIPE | |
| TIVFISAATNLFFSMITVLVSYFNIVLSILRIRSPEGRKKAFSTCASHMIAVTVFYGTMLFMYLQP | |
| QTNHSLDTDKMASVFYTLVIPMLNPLIYSLRNNDVNVALKKFMENPCYSFKSM. | |
| ATGGCTCCTGAAAATTTCACCAGGGTCACTGAGTTTATTCTCACAGGTGTCTCTAGCTGTC | (SEQ ID NO: 446) |
| CAGAGCTCCAGATTCCCCTCTTCCTGGTCTTCCTAGTGCTCTATGTGCTGACCATGGCAGG | |
| GAACCTGGGCATCATCACCCTCAGCAGTGTTGACTCTCGACTTCAAACCCCCATGTACTTTT | |
| TCCTGAGAGATCTAGCTATCATCAATCTTGGCAACTCTACTGTCATTGCCCCTAAAATGCTG | |
| ATGAACTTTTTAGTAAAGAAGAAAACTACCTCATTCTATGAATGTGCCACCCAACTGGGAG | |
| GGTTCTTGTTCTTTATTGTATCGGAGGTAATGATGCTGGCTGTGATGGCCTATGACCGCTA | |
| TGTGGCCATTTGTAACCCTCTGCTCTACATGGTGGTGGTGTCTCGGCGGCTCTGCCTCCTGC | |
| TGGTGTCCCTCACGTACCTCTATGGGTTTTCTACAGCTATTGTGGTTTCACCTTGTATATTC | |
| TCTGTGTCTTATTGCTCTTCTAATATAATCAATCATTTTTACTGTGATATTGCACCTCTGTT | |
| AGCATTATCTTGCTCTGATACTTACATACCAGAAACAATAGTCTTTATATCTGCAGCAACA | |
| AATTTGTTTTTTTCCATGATTACAGTTCTAGTATCTTATTTCAATATTGTTTTGTCCATTCTA | |
| AGGATAGGTTCACCAGAAGGAAGGAAAAAAGCCTTTTCCACCTGCGCTTCGCATATGATA | |
| GCAGTCACGGTTTTCTATGGGACAATGCTATTTATGTATTTGCAGCCCCAAACCAACCACT | |
| CACTGGATACTGATAAGATGGCTTCTGTGTTTTACACATTGGTGATTCCTATGCTGAATCC | |
| CTTGATCTACAGCCTGAGGAATAATGATGTAAATGTTGCCTTAAAGAAATTCATGGAAAAT | |
| CCATGTTACTCCTTTAAATCAATGTAA. | |
| AOLFR239 sequences: | |
| MDPQNYSLVSEFVLHGLCTSRHLQNFFFIFFFGVYVAIMLGNLLILVTVISDPCLHSSPMYFLLG | (SEQ ID NO: 447) |
| NLAFLDMWLASFATPKIVIIRDFLSDQKLISFGGCMAQIFFLHFTGGAEMVLLVSMAYDRYVAIC | |
| KPLHYMTLMSWQTCIRLVLASWVVGFVHSISQVAFTVNLPYGGPNEVDSFFCDLPLVIKLACM | |
| DTYVLGIIMISDSGLLSLSCFLLLLISYTVILLAIRQRAAGSTSKALSTCSAHIMVVTLFFGPCIFV | |
| YVRPFSRFSVDKLLSVFYTIFTPLLNPIIYTLRNEEMKAAMKKLQNRRVTFQ. | |
| ATGGACCCACAGAACTATTCCTTGGTGTCAGAATTTGTGTTGCATGGACTCTGCACTTCAC | (SEQ ID NO: 448) |
| GACATCTTCAAAATTTTTTCTTTATATTTTTCTTTGGGGTCTATGTGGCCATTATGGTGGGT | |
| AACCTTCTCATTTTGGTCACTGTAATTTCTGATCCCTGCCTGCACTCCTCCCCTATGTACTT | |
| CCTGCTGGGGAACCTAGCTTTCCTGGACATGTGGCTGGCCTCATTTGCCACTCCCAAGATG | |
| ATCAGGGATTTCCTTAGTGATCAAAAACTCATCTCCTTTGGAGGATGTATGGCTCAAATCT | |
| TCTTCTTGCACTTTACTGGTGGGGCTGAGATGGTGCTCCTGGTTTTCCATGGCCTATGACAG | |
| ATATGTGGCCATATGCAAACCCTTGCATTACATGACTTTGATGAGTTGGCAGACTTGCATC | |
| AGGCTGGTGCTGGCTTCATGGGTCGTTGGATTTGTGCACTCCATCAGTCAAGTGGCTTTCA | |
| CTGTAAATTTGCCTTACTGTGGCCCCAATGAGGTAGACAGCTTCTTCTGTGACCTCCCTCTG | |
| GTGATCAAACTTGCCTGCATGGACACCTATGTCTTGGGTATAATTATGATCTCAGACAGTG | |
| GGTTGCTTTCCTTGAGCTGTTTTCTGCTCCTCCTGATCTCCTACACCGTGATCCTCCTCGCT | |
| ATCAGACAGCGTGCTGCCGGTAGCACATCCAAAGCACTCTCCACTTGCTCTGCACATATCA | |
| TGGTAGTGACGCTGTTCTTTGGCCCTTGCATTTTTGTTTATGTGCGGCCTTTCAGTAGGTTC | |
| TCTGTGGACAAGCTGCTGTCTGTGTTTTATACCATTTTTACTCCACTCCTGAACCCCATTAT | |
| CTACACATTGAGAAATGAGGAGATGAAAGCAGCTATGAAGAAACTGCAAAACCGACGGGT | |
| GACTTTTCAATGA. | |
| AOLFR240 sequences: | |
| MAGENHTTLPEFLLLGFSDLKALQGPLFWVVLLVYLVTLLGNSLIILLTQVSPALHSPMYFFLR | (SEQ ID NO: 449) |
| QLSVVELFYTTDIVPRTLANLGSPHPQAISFQGCAAQMYVFIVLGISECCLLTAMAYDRYVAIC | |
| QPLRYSTLLSPRACLAMVGSSWLTGIITATTHASLIFSLPFRSHPIIPHFLCDILPVLRLASAGKHR | |
| SEISVMTATIVFIMIPFSLIVTSYIRILGAILAMASTQSRRKVFSTCSSHLLVVSLFFGTASITYIRPQ | |
| AGSSVTTDRVLSLFYTVITPMLNPIIYTLRNKDVRRALRHLVKRQRPSP. | |
| ATGGCTGGGGAAAACCATACTACACTGCCTGAATTCCTCCTTCTGGGATTCTCTGACCTCA | (SEQ ID NO: 450) |
| AGGCCCTGCAGGGCCCCCTGTTCTGGGTGGTGCTTCTGGTCTACCTGGTCACCTTGCTGGG | |
| TAACTCCGTGATCATGCTCCTCACACAGGTCAGGCCTGCGCTGCACTCCCCCATGTACTTCT | |
| TCCTGCGCCAACTCTCAGTGGTGGAGCTCTTCTACACCACTGACATCGTGCCCAGGACCCT | |
| GGCCAATCTGGGCTCCCCGCATCCGCAGGCCATCTCTTTCCAGGGCTGTGCAGCCCAGATG | |
| TACGTCTTCATTGTCGTGGGCATCTCGGAGTGCTGCCTGCTCACGGCCATGGCCTATGACC | |
| GATATGTTGCCATCTGCCAGCCCCTACGCTATTCCACCCTCTTGAGCCCACGGGCCTGCTT | |
| GGCCATGGTGGGGTCCTCCTGGCTCACAGGCATCATCACGGCCACCACCCATGCCTCCCTC | |
| ATCTTCTCTCTACCTTTTCGCAGCCACCCGATCATCCCGCACTTTCTCTGTGACATCCTGCC | |
| AGTACTGAGGCTGGCAAGTGCTGGGAAGCACAGGAGCGAGATCTCCGTGATGACAGCCAC | |
| CATAGTCTTCATTATGATCCCCTTCTCTCTGATTGTCACCTCTTACATCCGCATCCTGGGTG | |
| CCATCCTAGCAATGGCCTCCACCCAGAGCCGCCGCAAGGTCTTCTCCACGTGCTCCTCCCA | |
| TCTGCTCGTGGTCTCTCTCTTGTTTGGAACAGCCAGCATCACCTACATCCGGCCGCAGGGA | |
| GGCTCCTCTGTTACCACAGACCGCGTCCTCAGTCTCTTCTACACAGTCATCACACCCATGCT | |
| CAACCCCATCATCTACACCCTTCGGAACAAGGACGTGAGGAGGGCCCTGCGACACTTGGT | |
| GAAGAGGCAGCGCCCCTCACCCTGA. | |
| AOLFR241 sequences: | |
| MPQILIFTYLNMFYFFPPLQILAENLTMVTEFLLLGFSSLGEIQLALFVVFLFLYLVILSGNVTIIS | (SEQ ID NO: 451) |
| VIHLDKSLHTPMYFFLGILSTSETFYTFVILPKMLINLLSVARTISFNCCALQMFFFLGFAITNCLL | |
| LGVMGYDRYAAICHPLHYPTLMSWQVCGKLAAACAIGGFLASLTVVNLVFSLPFCSANKVNH | |
| YFCDISAVILLACTNTDVNEFVIFICGVLVLVVPFLFICVSYLCILRTILKIPSAEGRRKAFSTCAS | |
| HLSVVIVHYGCASFIYLRPTANYVSNKDRLVTVTYTIVTPLLNPMVYSLRNKDVQLAIRKVLG | |
| KKGSLKLYN. | |
| ATGCCCCAAATTCTTATATTCACATACCTGAATATGTTTTACTTCTTTCCCCCTTTGCAGAT | (SEQ ID NO: 452) |
| CTTGGCAGAAAACCTCACCATGGTCACCGAATTCCTGTTGCTGGGTTTTTCCAGCCTTGGT | |
| GAAATTCAGCTGGCCCTCTTTGTAGTTTTTCTTTTTCTGTATCTAGTCATTCTTAGTGGCAA | |
| TGTCACCATTATCAGTGTCATCCACCTGGATAAAAGCCTCCACACACCAATGTACTTCTTCC | |
| TTGGCATTCTCTCAACATCTGAGACCTTCTACACCTTTGTCATTCTACCCAAGATGCTCATC | |
| AATCTACTTTCTGTGGGCAGGACAATCTCCTTCAACTGTTGTGCTCTTCAAATGTTCTTCTT | |
| CCTTGGTTTTGCCATTACCAACTGCCTGCTATTGGGTGTGATGGGTTATGATCGCTATGCTG | |
| CCATTTGTCACCCTCTGCATTACCCCACTCTTATGAGCTGGCAGGTGTGTGGAAAACTGGC | |
| AGCTGCGTGTGCAATTGGTGGCTTCTTGGCCTCTCTTACAGTAGTAAATTTAGTTTTCAGCC | |
| TCCCTTTTTGTAGCGCCAACAAAGTCAATCATTACTTCTGTGACATCTCAGCAGTCATTCTT | |
| CTGGCTTGTACCAACACAGATGTTAACGAATTTGTGATATTCATTTGTGGAGTTCTTGTAC | |
| TTGTGGTTCCCTTTCTGTTTATCTGTGTTTCTTATCTCTGCATTCTGAGGACTATCCTGAAG | |
| ATTCCCTGAGCTGAGGGGAGACGGAAAGCGTTTTCCACCTGCGCCTCTCACCTCAGTGTTG | |
| TTATTGTTCATTATGGCTGTGCTTCCTTCATCTACCTGAGGCCTACAGCAAACTATGTGTCC | |
| AACAAAGACAGGCTGGTGACGGTGACATACACGATTGTCACTCCATTACTAAACCCCATG | |
| GTTTATAGCCTCAGAAACAAGGATGTCCAACTTGCTATCAGAAAAGTGTTGGGCAAGAAA | |
| GGTTCTCTAAAACTATATAATTGA. | |
| AOLFR242 sequences: | |
| MNTTLFHPYSFLLLGIPGLESMHLWVGFPFFAVFLTAVLGNITILFVIQTDSSLHHPMFYFLAILS | (SEQ ID NO: 453) |
| SIDPGLSTSTIPKMLGTFWFTLREISFEGCLTQMFFIHLCTGMESAVLVAMAYDCYVAICDPLCY | |
| TLVLTNKVVSVMALAIFLRPLVFVIPFVLFILRLPFCGHQIIPHTYGEHMGIARLSCASIRVNIIYG | |
| LCAISILVFDIIAIVISYVQILCAVFLLSSHDARLKAFSTCGSHVCVMLTFYMPAFFSFMTHRFGR | |
| NIPHFIHILLANFYVVIPPALNSVIYGVRTKQIRAQVLKMFFNK. | |
| ATGAATACCACTCTATTTCATCCTTACTCTTTCCTTCTTCTGGGAATTCCTGGGCTGGAAAG | (SEQ ID NO: 454) |
| TATGCATCTCTGGGTTGGTTTTCCTTTCTTTGCTGTGTTCCTGACAGCTGTCCTTGGGAATA | |
| TCACCATCCTTTTTGTGATTCAGACTGACAGTAGTCTCCATCATCCCATGTTCTACTTCCTG | |
| GCCATTCTGTCATCTATTGACCCGGGCCTGTCTACATCCACCATCCCTAAAATGCTTGGCAC | |
| CTTCTGGTTTAGCCTGAGAGAAATCTCCTTTGAAGGATGCCTTACCCAGATGTTCTTCATCC | |
| ACCTGTGCACTGGCATGGAATCAGCTGTGCTTGTGGCCATGGCCTATGATTGCTATGTGGC | |
| CATCTGTGACCCTCTTTGCTACACGTTGGTGCTGACAAACAAGGTGGTGTCAGTTATGGCA | |
| CTGGCCATCTTTCTGAGACCCTTAGTCTTTGTCATACCCTTTGTTCTATTTATCCTAAGGCT | |
| TCCATTTTGTGGACACCAAATTATTCCTCATACTTTATGGTGAGCACATGGGCATTGCCCGC | |
| CTGTCTTGTGCCAGCATCAGGGTTAACATCATCTATGGCTTATGTGCGATCTCTATCCTGGT | |
| CTTTGACATGATAGCAATTGTCATTTCCTATGTACAGATCCTTTGTGCTGTATTTCTACTCT | |
| CTTCACATGATGCACGACTCAAGGCATTCAGCACCTGTGGCTCTCATGTGTGTGTCATGTT | |
| GACTTTCTATATGCCTGCATTTTTCTCATTCATGACCCATAGGTTTGGTCGGAATATACCTC | |
| ACTTTATCCACATTCTTCTGGCTAATTTCTATGTAGTCATTCCACCTGCTCTCAACTCTGTA | |
| ATTTATGGTGTCAGAACCAAACAGATTAGAGCACAAGTGCTGAAAATGTTTTTCAATAAAT | |
| AA. | |
| AOLFR243 sequences: | |
| MEQVNKTVVREFVVLGFSSLARLQQLLFVIFLLLYLFTLGTNAIIISTIVLDRALHTPMYFFLAIL | (SEQ ID NO: 455) |
| SCSEICYTFVIVPKMLVDLLSQKKTISFLGCAIQMFSFLFFGSSHSFLLAAMGYDRYMAICNPLR | |
| YSVLMGHGVCMGLMAAACACGFTVSLVTTSLVFHLPFHSSNQLHHFFCDISPVLKLASQHSGF | |
| SQLVIFMLGVFALVIPLLLILVSYIRIISAILKIPSSVGRYKTFSTGASHLIVVTVHYSCASFIYLRPK | |
| TNYTSSQDTLISVSYTILTPLFNPMIYSLRNKEFKSALRRTIGQTFYPLS. | |
| ATGGAGCAAGTCAATAAGACTGTGGTGAGAGAGTTCGTCGTCCTCGGCTTCTCATCCCTGG | (SEQ ID NO: 456) |
| CCAGGCTGCAGCAGCTGCTCTTTGTTATCTTCCTGCTCCTCTACCTGTTCACTCTGGGCACC | |
| AATGCAATCATCATTTCCACCATTGTGCTGGACAGAGCCCTTCATACTCCCATGTACTTCTT | |
| CCTTGCCATCCTTTCTTGCTCTGAGATTTGCTATACCTTTGTCATTGTACCCAAGATGCTGG | |
| TTGACCTGCTGTCCCAGAAGAAGACCATTTCTTTCCTGGGCTGTGCCATCCAAATGTTTTCC | |
| TTCCTCTTCTTTGGCTCCTCTCACTCCTTCCTGCTGGCAGCCATGGGCTATGATCGCTATAT | |
| GGCCATCTGTAACCCACTGCGCTACTCAGTGCTCATGGGACATGGGGTGTGTATGGGACTA | |
| ATGGCTGCTGCCTGTGCCTGTGGCTTCACTGTCTCCCTGGTCACCACCTCCCTAGTATTTCA | |
| TCTGCCCTTCCACTCCTCCAACGAGCTCCATCAGTTCTTCTGTGACATGTCCCCTGTCCTTA | |
| AACTGGCATCTCAGCACTCCGGCTTCAGTCAGCTGGTCATATTCATGCTTGGTGTATTTGC | |
| CTTGGTCATTCCTCTGCTACTTATCCTAGTCTCCTACATGCGCATCATCTCTGCCATTCTAA | |
| AAATCCCTTCCTCCGTTGGAAGATACAAGACCTTCTCCACCTGTGCCTCCCATCTCATTGTG | |
| GTAACTGTTCACTACAGTTGTGCCTCTTTCATCTACTTAAGGCCCAAGACTAATTACACTTC | |
| AAGCCAAGACACCCTAATATCTGTGTCATACACCATCCTTACCCCATTGTTCAATCCAATG | |
| ATTTATAGTCTGAGAAATAAGGAATTCAAATCAGCCCTACGAAGAACAATCGGCCAAACT | |
| TTCTATCCTCTTAGTTAA. | |
| AOLFR244 sequences: | |
| MWQEYYFLNVFFPLLKVCCLTTNSHVVILLPWECYHLIWKILPYIGTTVGSMEEYNTSSTDFTF | (SEQ ID NO: 457) |
| MGLFNRKETSGLIFAIISIIFFTALMANGVMIFLIQTDLRLHTPMYFLLSHLSLIDMMYISTIVPKM | |
| LVNYLLDQRTISFVGCTAQHFLYLTLVGAEFFLLGLMAYDRYVAICNPLRYPVLMSRRVCWMI | |
| IAGSWFGGSLDGFLLTPITMSFPFCNSREINHFFCEAPAVLKLACADTALYETVMYVCCVLMLL | |
| IPFSVVLASYARILTTVQCMSSVEGRKKAFATCSSHMTVVSLFYGAAMYTYMLPHSYHKPAQ | |
| DKVLSVFYTILTPMLNPLIYSLRNKDVTGALKRALGRFKGPQRVSGGVF. | |
| ATGTGGCAAGAATACTATTTTTTAAATGTTTTCTTCCCACTTTTAAAAGTTTGCTGCCTAAC | (SEQ ID NO: 458) |
| AATTAATTCACATGTTGTTATTTTACTGCCCTGGGAATGCTATCATCTTATTTGGAAGATAT | |
| TACCTTATATCGGCACAACTGTAGGATCAATGGAAGAGTACAACACATCCTCTACAGACTT | |
| CACTTTCATGGGGCTGTTCAACAGAAAGGAAACCTCAGGTCTTATTTTTGCCATCATCTCT | |
| ATCATCTTCTTCACCGCACTGATGGCCAATGGGGTTATGATCTTCCTGATGCAAACAGATFF | |
| TGCGCCTTCATACACCCATGTACTTCCTCCTCAGCCACCTTTCCTTAATTGACATGATGTAT | |
| ATTTCCACTATTGTGCCTAAGATGCTGGTTAATTACCTGCTGGATCAAAGGACCATTTCCTT | |
| TGTGGGGTGCACAGCTCAACACTTGCTCTACCTTACCCTTGTGGGAGCTGAATTGTTGCTG | |
| CTGGGCCTCATGGCCTATGACGGCTATGTGGCCATTTGCAACCCTCTGAGATACCCTGTCC | |
| TCATGAGCCGCCGGGTCTGTTGGATGATTATAGCAGGTTCCTGGTTTGGGGGCTCTTTGGA | |
| TGGCTTCCTCCTAACCCCCATCACCATGAGCTTTCCCTTCTGCAATTCCCGGGAGATTAACC | |
| ACTTCTTCTGTGAGGCACCAGCAGTCCTGAAGTTGGCATGTGCAGACACAGCCCTCTAGGA | |
| GACAGTGATGTATGTGTGCTGTGTTTTGATGCTGCTGATTCCTTTGTGTGTAGTCCTTGCTT | |
| CCTATGCCCGAATCCTGACTACAGTTCAGTGCATGAGCTCAGTGGAGGGCAGGAAGAAGG | |
| CATTTGCCACTTGCTCATCCCACATGAGTGTGGTGTCCTTGTTCTACGGGGCTGCCATGTAC | |
| ACCTACATGCTGCCACATTCTTACCACAAGCCAGCCCAGGACAAAGTCCTCTCTGTGTTTT | |
| ACACCATTCTCACACCCATGCTGAACCCCGTCATCTACAGCCTTAGAAACAAGGATGTGAC | |
| TGGAGCTCTGAAGAGGGCCTTGGGGAGGTTCAAGGGTCCTCAAAGGGTGTCAGGAGGTGT | |
| CTTTTGA. | |
| AOLFR245 sequences: | |
| MDLKNGSLVTEFILLGFFGRWELQIFFFVTFSLIYGATVMGNILIMVTVTCRSTLHSPLYFLLGN | (SEQ ID NO: 459) |
| LSFLDMCLSTATTPKMIIDLLTDHKTISVWGCVTQMFFMHFFGGAEMTLLHMAFDRYVAICKP | |
| LHYRTIMSHKLLKGFAILSWIIGFLHSISQIVLTMNLPFCGHNVINIFGDLPLVIKIACIETYTLE | |
| LFVIADSGLLSFTCFILLLVSYIVILVSVPKKSSHGLSKALSTLSAHIIVVTLFFCPCIFIYVWPFSSL | |
| ASNKTLAVFYTVITPLLNPSIYTLRNKKMQEAIRKLRFQYVSSAQNF. | |
| ATGGATCTTAAAAATGGATCTCTAGTGACCGAGTTTATTTTACTAGGATTTTTTGGACGAT | (SEQ ID NO: 460) |
| GGGAACTTCAAATTTTCTTCTTTGTGACATTTTCCCTGATCTACGGTGCTACTGTGATGGGA | |
| AACATTCTCATTATGGTCACAGTGACATGTAGGTCAACCCTTCATTCTCCCTTGTACTTTCT | |
| CCTTGGAAATCTCTCTTTTTFGGACATGTGTCTCTCCACTGCCACAACACCCAAGATGATCA | |
| TAGATTTGCTCACTGACCACAAGACCATCTCTGTGTGGGGCTGCGTGACCCAGATGTTCTT | |
| CATGGACTTCTTTGGGGGTGCTGAGATGACTCTTCTGATAATGATGGCCTTTGACAGGTAT | |
| GTAGCCATATGTAAACCCCTGCACTATAGGACAATCATGAGCCACAAGCTGCTAAAGGGG | |
| TTTGCGATACTTTCATGGATAATTGGTTTTTTACACTCCATAAGCCAGATAGTTTTAACAAT | |
| GAACTTGCCTTTCTGTGGCCACAATGTCATAAACAACATATTTTGTGATCTTCCCCTTGTGA | |
| TCAAGCTTGCTTGCATTGAAACATACACCCTGGAATTATTTGTCATTGCTGACAGCGGGCT | |
| GCTCTCTTTCACCTGTTTCATCCTCTTGCTTGTTTCTTACATTGTCATCCTGGTCAGTGTACC | |
| AAAAAAATCATCACATGGGCTCTCCAAGGCGCTGTCCACATTGTCTGCCCACATCATTGTG | |
| GTCACTGTGTTCTTTGGACCTTGTATTTTTATCTATGTTTGGCCATTCAGTAGTTTGGCAAG | |
| CAATAAAAGTCTTGCCGTATTTTATACAGTTATCACACCCTTACTGAATCCGAGTATTTATA | |
| CCCTGAGAAATAAGAAAATGCAAGAGGCCATAAGAAAATTACGGTTCCAATATGTTAGTT | |
| CTGCACAGAATTTCTAG. | |
| AOLFR246 sequences: | |
| MSPENQSSVSEFLLLGLPIRPEQQAVFFTLFLGMYLTTVLGNLLIMLLIQLDSHLHTPMYFFLSH | (SEQ ID NO: 461) |
| LALTDISFSSVTVPKMLMDMRTKYKSILYEECISQMYFFIFFTDLDSFLITSMAYDRYVAICHPL | |
| HYTVIMREELCVFLVAVSWILSCASSLSHTLLLTRLSFCAANTIPHVFCDLAALLKLSCSDIFLNE | |
| LVMFTVGVVVITLPFMCILVSYGYIGATILRVPSTKGIHKALSTCGSHLSVVSLYYGSIFGQYLF | |
| PTVSSSIDKDVIVALMYTVVTPMLNPFIYSLRNRDMKEALGKLFSRATFFSW. | |
| ATGAGCCCTGAGAACCAGAGCAGCGTGTCCGAGTTCCTCCTTCTGGGCCTCCCCATCCGGC | (SEQ ID NO: 462) |
| CAGAGCAGCAGGCTGTGTTCTTCACCCTGTFFCCTGGGCATGTACCTGACCACGGTGCTGGG | |
| GAACCTGCTCATCATGCTGCTCATCCAGCTGGACTCTCACCTTCACACCCCCATGTACTTCT | |
| TCCTCAGCCACTTGGCTCTCACTGACATCTCCTTTTCATCTGTCACTGTCCCTAAGATGCTG | |
| ATGGACATGCGGACTAAGTACAAATCGATCCTCTATGAGGAATGCATTTCTCAGATGTATT | |
| TTTTTATAtTTTTTACTGACCTGGACAGCTTCCTTATTACATCAATGGCATATGACCGATAT | |
| GTTGCCATATGTCACCCTCTCCACTACACTGTCATCATGAGGGAAGAGCTCTGTGTCTTCTT | |
| AGTGGCTGTATCTTGGATTCTGTCTTGTGCCAGCTCCCTCTCTCACACCCTTCTCCTGACCC | |
| GGCTGTCTTTCTGTGCTGCGAACACCATCCCCCATGTCTTCTGTGACCTTGCTGCCCTGCTC | |
| AAGCTGTCCTGCTCAGATATCTTCCTCAATGAGCTGGTCATGTTCACAGTAGGGGTGGTGG | |
| TCATTACGCTGCGATTCATGTGTATCCTGGTATGATATGGCTACATTGGGGCGACCATCCTG | |
| AGGGTCCCTTCAAGCAAAGGGATCCACAAAGCATTGTCCACATGTGGCTCCCATCTCTCTG | |
| TGGTGTCTCTCTATTATGGGTCAATATTTGGCCAGTACCTTTTCCCGACTGTAAGCAGTTCT | |
| ATTGACAAGGATGTCATTGTGGCTCTCATGTACACGGTGGTCACACCCATGTTGAACGCCT | |
| TTATCTACAGCGTTAGGAACAGGGACATGAAAGARGCCCTTGGGAAACTCTTCAGTAGAG | |
| CAACATTTTTCTCCTTGGTGACATCTGACTTTTTAAAAAATTAG. | |
| AOLFR247 sequences: | |
| MGQHLTVLTEFILMELTRRPELQIPLFGVFLVIYLITVVGNLTMIILTKLDSHLHTPMYFSIRHL | (SEQ ID NO: 463) |
| ASVDLGNSTVICPKVLANFVVDRNTISYYAGAAQLAFFLMFIISEFFILSAMAYDRYVAICNPLL | |
| YYVIMSQRLCHVLVGIQYLYSTFQALMFTIKIFTLTFCGSNVISHFYGDDVPLLPMLCSNAQEIE | |
| LLSILFSVFNLISSFLIVLVSYMLILLAICQMHSAEGRKKAFSTCGSHLTVVVVFYGSLLFMYMQ | |
| PNSTHFFDTDKMASVFYTLVIPMLNPLIYSLRNEEVKNAFYKLFEN. | |
| ATGGGCCAACACAATCTAACAGTGCTAACTGAATTCATTCTGATGGAACTCACAAGGCGGC | (SEQ ID NO: 464) |
| CTGAGCTGCAGATTCCCCTTTTTGGAGTCTTCCTCGTCATGTACCTAATCACAGTGGTGGGC | |
| AACCTAACTATGATCATTTTGACCAAACTGGACTCCCACTTACATACACCTATGTACTTTTC | |
| TATCAGACATTTGGCTTCTGTTGATCTTGGTAATTCTACTGTCATTTGTCCCAAGGTGCTGG | |
| CAAATTTTGTTGTGGATCGAAATACTATTTCCTATTATGCATGTGCTGCACAGCTGGCATTC | |
| TTCCTTATGTTCATTATCAGTGAATTTTTCATCCTGTCAGCCATGGCCTATGACCGCTATGT | |
| GGCCATTTGTAACCCTCTGCTCTATTATGTTATTATGTCTCAGCGACTGTGTCATGTACTGG | |
| TGGGCATTCAATATCTCTACAGCACATTTCAGGCTCTGATGTTCACTATTAAGATTTTTACA | |
| TTGACCTTCTGTGGCTCTAATGTCATCAGTCATTTTTACTGTGATGATGTTCCTTTGCTACC | |
| TATGCTTTGCTCAAATGCACAGGAAATAGAATTGTTGAGCATACTATTTTCTGTATTTAATT | |
| TGATCTCCTCCTTTCTGATAGTCTTAGTGTCCTACATGTTGATTTTGTTAGCTATATGTCAA | |
| ATGCATTCTGCAGAGGGCAGGAAAAAGGCTTTCTCCACATGTGGTTCCCATTTGACAGTGG | |
| TGGTTGTGTTCTATGGGTCTCTACTCTTCATGTACATGCAGCCCAATTCCACTCACTTCTTT | |
| GATACTGATAAAATGGCTTCTGTGTTTTACACTTTAGTAATCCCCATGCTTAACCCTTTGAT | |
| TTACAGCTTAAGAAACGAAGAGGTGAAAAATGCCTTCTATAAGCTCTTTGAGAATTGA. | |
| AOLFR248 sequences: | |
| MPCMPCALPTGGLLPHPQHTMMEIANVSSPEVFLLGFSTRPSLETVLFIVVLSFYMVSILGNGI | (SEQ ID NO: 465) |
| IILVSHTDVHLHTPMYFFLANLPFLDMSFTTSIVPQLLANLWGPQKTISYGGCVVQFYISHWLG | |
| ATECVLLATMSYDRYAAICRPLHYTVIMHPQLCLGLALASWLGGLTTSMVGSTLTMLLPLCG | |
| NNCIDHFFCEMPLIMQLACVDTSLNEMEMYLASFVFVLPLGLILVSYGHIARAVLKIRSAEGR | |
| RKAFNTCSSHVAVVSLFYGSIIFMYLQPAKSTSHEQGKFIALFYTVVTPALNPLIYTLRNTEVKS | |
| ALRHMVLENCCGSAGKLAQI. | |
| ATGCCCTGTATGCGCTGTGCTCTTCCCACAGGTGGCCTTTTGCCCCACCCCCAGCATACAAT | (SEQ ID NO: 466) |
| GATGGAAATAGCCAATGTGAGTTCTCCAGAAGTCTTTGTCCTCCTGGGCTTCTCCACACGA | |
| CCCTCACTAGAAACTGTCCTCTTCATAGTTGTCTTGAGTTTTTACATGGTATCGATCTTGGG | |
| CAATGGCATCATCATTCTGGTCTCCCATACAGATGTGCACCTCCACACACCTATGTACTTCT | |
| TTCTTGCCAACCTCCCCTTCCTGGACATGAGCTTCACCACGAGCATTGTCCCACAGCTCCTG | |
| GCTAACCTCTGGGGACCACAGAAAACCATAAGCTATGGAGGGTGTGTGGTCCAGTTCTAT | |
| ATCTCCCATTGGCTGGGGGCAACCGAGTGTGTCCTGCTGGCCACCATGTCCTATGACCGCT | |
| ACGCTGCCATCTGCAGGCCACTCCATTACACTGTCATTATGCATCCACAGCTTTGCCTTGG | |
| GCTAGCTTTGGCCTCCTGGCTGGGGGGTCTGACCACCAGCATGGTGGGCTCCACGGTCACC | |
| ATGCTCCTACCGCTGTGTGGGAACAATTGCATCGACCACTTCTTTTGCGAGATGCCGCTCA | |
| TTATGCAACTGGCTTGTGTGGATACCAGCCTCAATGAGATGGAGATGTACCTGGCCAGCTT | |
| TGTCTTTGTTGTGCTGCCTGTGGGGCTCATCCTGGTCTCTTACGGCCACATTGCCCGGGCCG | |
| TGTTGAAGATCAGGTCAGCAGAAGGGCGGAGAAAGGCATTCAACACCTGTTCTTCCCACG | |
| TGGCTGTGGTGTCTCTGTTTTACGGGAGCATCATCTTCATGTATCTCCAGCCAGCCAAGAG | |
| CACCTCCCATGAGCAGGGCAAGTTCATAGCTCTGTTCTACACCGTAGTCACTCCTGCGCTG | |
| ACCCACTTATTTACACCCTGAGGAACACGGAGGTGAAGAGCGCCCTCCGGCACATGGTA | |
| TTAGAGAACTGCTGTGGCTCTGCAGGCAAGCTGGCGCAAATTTAG. | |
| AOLFR249 sequences: | |
| MKSQIEKSDLKYRAILLQKVTRMFLLFWVLLLVLSRLLVVMGRGNSTEVTEFHLLGFGVQHEF | (SEQ ID NO: 467) |
| QHVLFIVLLLIYVTSLIGNIGMILLIKTDSRLQTPMYFFPQHLAFVDICYTSAITPKMLQSFTEEN | |
| NLITFRGCVIQFLVYATFATSDCYLLAIMAMDCYVAICKPLRYPMIMSQTVYIQLVASYIIGSI | |
| NASVHTGFTFSLSFCKSNKINHFFCDGLPILALSCSNIDINIILDVVFVGFDLMFTELVIIFSYIYIM | |
| VTILKMSSTAGRKKSFSTCASHLTAVTIFYGTLSYMYLQPQSNNSQENMKVASIFYGTVIPMLN | |
| PLIYSLRNKEGK. | |
| ATGAAAAGTCAAATTGAAAAAAGTGACTTAAAATATAGAGCCATTTTATTGCAAAAAGTC | (SEQ ID NO: 468) |
| ACAAGGATGTTCCTGCTTTTCTGGGTCCTTCTCTTGGTCCTTTCTAGACTTTTGGTAGTCAT | |
| GGGTCGAGGAAACAGCACTGAAGTGACTGAATTCCATCTTCTGGGATTTGGTGTCCAACAC | |
| GAATTTCAGCATGTCCTTTTCATTGTACTTCTTCTTATCTATGTGACCTCCCTGATAGGAAA | |
| TATTGGAATGATCTTACTCATCAAGACCGATTCCAGACTTCAAACACCCATGTACTTTTTTC | |
| CACAACATTTGGCTTTTGTTGATATCTGTTATACTTCTGCTATCACTCCCAAGATGCTCCAA | |
| AGCTTCACAGAAGAAAATAATTTGATAACATTTCGGGGCTGTGTGATACAATTCTTAGTTT | |
| ATGCAACATTTGCAACCAGTGACTGTTACCTCCTAGCTATTATGGCAATGGATTGTTATGT | |
| TGCCATCTGTAAGCCCCTTCGCTATCCCATGATCATGTCCCACAGTCTACATCCAACTGG | |
| TAGCTGGCTCATATATTATAGGCTCAATAAATGCCTCTGTACATACAGGTTTTACATTTTCA | |
| CTGTCCTTCTGCAAGTCTAATAAAATCAATCACTTTTTCTGTGATGGTCTCCCAATTCTTGC | |
| CCTTTCATGCTCCAACATTGACATCAACATCATTCTAGATGTTGTCTTTGTGGGATTTGACT | |
| TGATGTTCACTGAGTTGGTCATCATCTTTTCCTACATCTACATTATGGTCACCATCCTGAAG | |
| ATGTGTTCTACTGCTGGGAGGAAAAAATCCTTCTCCACATGTGCCTCCCACCTGACAGCAG | |
| TAACCATTTTCTATGGGACACTCTCTTACATGTACTTACAGCCTCAGTCTAATAATTCTCAG | |
| GAGAATATGAAAGTAGCCTCTATATTTTATGGCACTGTTATTCCCATGTTGAATCCTTTAAT | |
| CTATAGCTTGAGAAATAAGGAAGGAAAATAA. | |
| AOLFR250 sequences: | |
| MENQSSISEFFLRGISAPPEQQQSLFGIFLCMYLVTLTGNLLIILAIGSDLHLHTPMYFFLANLSFV | (SEQ ID NO: 469) |
| DMGLTSSTVTKMLVNIQTRHHTISYTGCLTQMYFFLMFGDLDSFFLAAMAYDRYVAICHPLCY | |
| STVMRPQVCALMLALCWVLTNIVALTHTFLMARLSFCVTGEIAHFFCDITPVLKLSCSDTHINE | |
| MMVFVLGGTVLIVPFLCIVTSYIHIVPAILRVRTRGGVGKAFSTCSSHLCVVCVFYGTLFSAYLC | |
| PPSIASEEKDIAAAAMYTIVTPMLNPFIYSLRNKDMKGALKRLFSHRSIVSS. | |
| ATGGAAAACCAATCCAGCATTTCTGAATTTTTCCTCCGAGGAATATCAGCGCCTCCAGAGC | (SEQ ID NO: 470) |
| AACAGCAGTCCCTCTTCGGAATTTTCCTGTGTATGTATCTTGTCACCTTGACTGGGAACCTG | |
| CTCATCATCCTGGCCATTGGCTCTGACCTGCACCTCCACACCCCCATGTACTTTTTCTTGGC | |
| CAACCTGTCTTTTGTTGACATGGGTTTAACGTCCTCCACAGTTACCAAGATGCTGGTGAAT | |
| ATACAGACTCGGCATCACAGCATCTCCTATACGGGTTGCCTCACGCAAATGTATTTCTTTCT | |
| GATGTTTGGTGATCTAGACAGCTTCTTCCTGGCTGCCATGGCGTATGACCGCTATGTGGCC | |
| ATTTGCCACCCCCTCTGCTACTCCACAGTCATGAGGCCCCAAGTCTGTGCCCTAATGCTTGC | |
| ATTGTGCTGGGTCCTCACCAATATCGTTGCCCTGACTCACACGTTCCTCATGGCTCGGTTGT | |
| CCTTCTGTGTGACTGGGGAUAATTGCTCACTTTTTCTGTGACATCACTCCTGTCCTGAAGCTG | |
| TCATGTTCTGACACCCACATCAACGAGATGATGGTTTTTGTCTTGGGAGGCACCGTACTCA | |
| TCGTCCCCTTTTTATGCATTGTCACCTCCTACATCCACATTGTGCCAGCTATCCTGAGGGTC | |
| CGAACCCGTGGTGGGGTGGGCAAGGCCTTTTCCACCTGCAGTTCCCACCTCTGCGTTGTTT | |
| GTGTGTTCTATGGGACCCTCTTCAGTGCCTACCTGTGTCCTCCCTCCATTGCCTCTGAAGAG | |
| AAGGACATTGCAGCAGCTGCAATGTACACCATAGTGACTCCCATGTTGAACCCCTTTATCT | |
| ATAGCCTAAGGAACAAGGACATGAAGGGGGCCCTAAAGAGGCTCTTCAGTCACAGGAGTA | |
| TTGTTTCCTCTTAG. | |
| AOLFR251 sequences: | |
| MEGNKTWITDITLPRFQVGPALEILLCGLFSAFYTLTLLGNGVIFGIICLDCIKLHTPMYFFLSHLA | (SEQ ID NO: 471) |
| IVDISYASNYVPKMLTNLMNQESTISFFPCIMQTFLYLAFAHVECLILVVMSYDRYADICHPLRY | |
| NILMSWRVCTVLAVASWVFSFLLALVPLVLILRIPFCGPHEINHFCEILSVLKACADTWLNQV | |
| VIFAACVFILVGPLCLVLVSYLRILAAILRIQSGEGRRKAFSTCSSHLCVVGLFFGSAIVTYMAPK | |
| SRHPEEQQKVLSLFYSLFNPMLNPLIYSLRNAEVKGALRRALRKERLT. | |
| ATGGAAGGCAACAAGACATGGATCACAGACATCACCTTGCCGCGATTCCAGGTTGGTCCA | (SEQ ID NO: 472) |
| GCACTGGAGATTCTCCTCTGTGGACTTTTCTCTGCCTTCTATACACTCACCCTGCTGGGGAA | |
| TGGGGTCATCTTTGGGATTATCTGCCTGGACTGTAAGCTTCACACACCCATGTACTTCTTCC | |
| TCTCACACCTGGCCATTGTTGACATATCCTATGCTTCCAACTATGTCCCCAAGATGCTGACG | |
| AATCTTATGAACCAGGAAAGCACCATCTCCTTTTTTCCATGCATAATGCAGACATTCTTGT | |
| ATTTGGCTTTTGCTCACGTAGAGTGTCTGATTTTGGTGGTGATGTCCTATGATCGCTATGGG | |
| GACATCTGCCACCCCTTACGTTACAATATCCTCATGAGCTGGAGAGTGTGCACTGTCCTGG | |
| CTGTGGCTTCCTGGGTGTTCAGCFTCCTCCTGGCTCTGGTCCCTTTAGTTCTCATCCTGAGG | |
| CTGCCCTTCTGCGGGCCTCATGAATCAACCACTTCTGTGAAATCCTGTCTGTCCTCAAGTT | |
| GGCCTGTGCTGACACCTGGCTCACCAGGTGGTCATCTTTGCAGCCTGCGTGTTCATCCTG | |
| GTGGGGCCACTCTGCCTGGTGCTGGTCTCCTACTTGCGCATCCTGGCCGCCATCTTGAGGA | |
| TCCAGTCTGGGGAGGGCCGCAGAAAGGCCTTCTCCACCTGCTCCTCCCACCTTTGCGTGGT | |
| GGGACTCTTCTTTGGCAGCGCCATTGTCACGTACATGGCCCCCAAGTCCCGCCATCCTGAG | |
| GAGCAGCAGAAAGTTCTTTCCCTGTTTTACAGCCTTTTCAATCCAATGCTGAACCCCCTGA | |
| TATATAGCCTAAGGAATGCAGAGGTCAAGGGCGCCCTGAGGAGGGCACTGAGGAAGGAG | |
| AGGCTGACGTGA. | |
| AOLFR252 sequences: | |
| MRLANQTLGGDFFLLGIFSQISHPGRCLLIFSIFLMAVSWNITLILLIHIDSSLHTPMYFFINQLSL | (SEQ ID NO: 473) |
| IDLTYISVTVPKMLVNQLAKDKTISVLGCGTQMYFYLQLGGAECCLLAAMAYDRYVAICHPLR | |
| YSVLMSHRVCLLLASGCWFVGSVDGFMLTPLAIMSFPFCRSHEIQHFFCEVPAVLKLSCSDTSLY | |
| KIFMYLCCVIMLLIPVTVISVSYYYIILTIHKMNSVEGRKKAFTTCSSHITVVSLFYGAAIYNYML | |
| PSSYQTPEKDMMSSFFYTILTPVLNPIIYSFRNKDVTRALKKMLSVQKPPY. | |
| ATGCGGCTGGCCAACCAGACCCTGGGTGGTGACTTTTTCCTGTTGGGAATCTTCAGCCAGA | (SEQ ID NO: 474) |
| TCTCACACCCTGGCCGCCTCTGCTTGCTTATCTTCAGTATATTTTTGATGGCTGTGTCTTGG | |
| AATATTACATTGATACTTCTGATCCACATTGACTCCTCTCTGCATACTCCCATGTACTTCTT | |
| TATAAACCAGCTCTCACTCATAGACTTGACATATATTTCTGTCACTGTCCCCAAAATGCTG | |
| GTGAACCAGCTGGCCAAAGACAAGACCATCTCGGTCCTTGGGTGTGGCACCCAGATGTAC | |
| TTCTACCTGCAGTTGGGAGGTGCAGAGTGCTGCCTTCTAGCCGCCATGGCCTATGACCGCT | |
| ATGTGGCTATCTGCCATCCTCTCCGTTACTCTGTGCTCATGAGCCATAGGGTATGTCTCCTC | |
| CTGGCATCAGGCTGCTGGTTTGTGGGCTCAGTGGATGGCTTCATGCTCACTCCCATCGCCA | |
| TGAGCTTCCCCTTCTGCAGATCCCATGAGATTCAGCACTTCTTCTGTGAGGTCCCTGCTGTT | |
| TTGAAGCTCTCTTGCTCAGACACCTCACTTTACAAGATTTTCATGTACTTGTGCTGTGTCAT | |
| CATGCTCCTGATACCTGTGACGGTCATTTCAGTGTCTTACTACTATATCATCCTCACCATCC | |
| ATAAGATGAACTCAGTTGAGGGTCGGAAAAAGGCCTTCACCACCTGCTCCTCCCACATTAC | |
| AGTGGTCAGCCTCTTCTATGGAGCTGCTATTTACAACTACATGCTCCCCAGCTCCTACCAA | |
| ACTCCTGAGAAAGATATGATGTCATCCTTTTTCTACACTATCCTTACACCTGTCTTGAATCC | |
| TATCATTTACAGTTTCAGGAATAAGGATGTCACAAGGGCTTTGAAAAAAATGCTGAGCGT | |
| GCAGAAACCTCCATATTAA. | |
| AOLFR253 sequences: | |
| MTFFSSGGNCEPVMCSGNQTSQNQTASTDFTLTGLFAESKHAALLYTVTFLLFLMALTGNALL | (SEQ ID NO: 475) |
| ILLIHSEPRLHTPMYFFISQLALMDLMYLCVTVPKMLVGQVTGDDTISPSGCGIQWFHLTLAG | |
| AEVFLLAAMAYDRYAAVCRPLHYPLLMNQRVCQLLVSACWVLGMVDGLLLTPITMSFPFCQS | |
| RKILSFFCETPALLKLSCSDVSLYKMLTYLCCILMLLTPIMVISSSYTLILHLIHRMNSAAGRRKA | |
| LATCSSHMIIVLLLFGASFYTYMLRSSYHTAEQDMMVSAFYTIFTPVLNPLIYSLRNKDVTRAL | |
| RSMMQSRMNQEK. | |
| ATGACTTTTTTTTCCTCAGGGGGAAACTGTGAGCCAGTCATGTGCTCAGGGAATCAGACTT | (SEQ ID NO: 476) |
| CTCAGAATCAAACAGCAAGCACTGATTTCACCCTCACGGGACTCTTTGCTGAGAGCAAGCA | |
| TGCTGCCCTCCTCTACACCGTGACCTTCCTTCTTTTCTTGATGGCCCTCACTGGGAATGCCC | |
| TCCTCATCCTCCTGATCCACTCAGAGCCCCGCCTCCACACCCCCATGTACTTCTTCATCAGC | |
| CAGCTCGCGCTCATGGATCTCATGTACCTATGCGTGACTGTGCCCAAGATGCTTGTGGGCC | |
| AGGTCACTGGAGATGATACCATTTCCCCGTCAGGCTGTGGGATCCAGATGTTCTTCCACCT | |
| GACCCTGGCTGGAGCTGAGGTTTTCCTCCTGGCTGCCATGGCCTATGACCGATATGCTGCT | |
| GTTTGCAGACCTCTCCATTACGCACTGCTGATGAACCAGAGGGTGTGCCAGCTCCTGGTGT | |
| CAGCCTGGTGGGTTTTGGGAATGGTTGATGGTTTGTTGCTCACCCCCATTACCATGAGCTT | |
| CCCCTTTTGCCAGTCTAGGAAAATCCTGAGTTTTTTCTGTGAGACTCCTGCCCTGGTGAAGC | |
| TCTCCTGCTCTGACGTCTCCCTCTATAAGATGCTCACGTACCTGTGCTGCATCCTCATGCTT | |
| CTCACCCCCATCATGGTCATCTCCAGCTCATACACCCTCATCCTGCATCTCATCCACAGGAT | |
| GAATTCTGCCGCCGGCCGCAGGAAGGCCTTGGCCACCTGCTCCTCCCACATGATCATAGTG | |
| CTGCTGCTCTTCGGTGCTTCCTTCTACACCTACATGCTCCGGAGTTCCTACCACACAGCTGA | |
| GCAGGACATGATGGTGTCTGCCTTTTACACCATCTTCACTCCTGTGCTGAACCCCCTCATTT | |
| ACAGTCTCCGCAACAAAGATGTCACCAGGGCTCTGAGGAGCATGATGCAGTCAAGAATGA | |
| ACCAAGAAAAGTAG. | |
| AOLFR254 sequences: | |
| MTNTSSSDFTLLGLLVNSEAAGIVFTVILAVFLGAVTANLVMIFLIQVDSRLHTPMYFLLSQLSI | (SEQ ID NO: 477) |
| MDTLFICTTVPKLLADMVSKMIISFVACGIQIFLYLTMIGSEFFLLGLMAYDCYVAVCNPLRYP | |
| VLMNRKKCLLLAAGAWFGGSLDGFLLTPITMNVPYCGSRSINHFFCEIPAVLKLACADTSLYET | |
| LMYICCVLMLLIPISIISTSYSLILLTIHRMPSAEGRKKAFTTCSSHLTVVSIFYGAAFYTYVLPQS | |
| FHTPEQDKVVSAFYTIVTPMLNPLIYSLRNKDVIGAFKKVFACCSSAQKVATSDA. | |
| ATGACGAACACATCATCCTCTGACTTCACCCTCCTGGGGCTTCTGGTGAACAGTGAGGCTG | (SEQ ID NO: 478). |
| CCGGGATTGTATTTAGAGTGATCCTTGCTGTTTTCTTGGGGGCCGTGACTGCAAATTTGGT | |
| CATGATATTCTTGATTCAGGTGGACTCTCGCCTCCACACCCCCATGTACTTTCTGCTCAGTC | |
| AGCTGTCCATCATGGACACCCTTTTCATGTGTACCACTGTCCCAAAACTCCTGGCAGACAT | |
| GGTTTCTAAAGAGAAGATCATTTCCTTTGTGGCCTGTGGCATGCAGATCTTCCTCTACCTG | |
| ACCATGATTGGTTCTGAGTTCTTCCTCCTGGGCCTCATGGCCTATGACTGCTACGTGGCTGT | |
| CTGTAACCCTCTGAGATACCCAGTCCTGATGAACCGCAAGAAGTGTCTTTTGCTGGCTGCT | |
| GGTGCCTGGTTTGGGGGCTCCCTCGATGGCTTTCTGCTCACTCCCATCACCATGAATGTCC | |
| CTTACTGTGGCTCCCGAAGTATCAACCATTTTTTCTGTGAGATCCCAGCAGTTCTGAAACT | |
| GGCCTGTGCAGACACGTCCTTGTATGAAACTCTGATGTACATCTGCTGTGTCCTCATGTTG | |
| CTCATCCCCATCTCTATCATCTCCACTTCCTACTCCCTCATCTTGTTAACCATCCACCGCAT | |
| GCCCTCTGCTGAAGGTCGCAAAAAGGCCTTCACCACTTGTTCCTCCCACTTGACTGTAGTT | |
| AGCATCTTCTATGGGGCTGCCTTCTACACATACGTGCTGCCCCAGTCCTTCCACACCCCCG | |
| AGCAGGACAAAGTAGTGTCAGCCTTCTATACCATTGTCACGCCCATGCTTAATCCTCTCAT | |
| CTACAGCCTCAGAAACAAGGACGTCATAGGGGCATTTAAAAAGGTATTTGCATGTTGCTCA | |
| TCTGCTCAGAAAGTAGCAACAAGTGATGCTTAG. | |
| AOLFR255 sequences: | |
| MEQSNYSVYADFILLGLFSNARFPWLLFALILLVFLTSIASNVVKIILIHIDSRLHTPMYFLLSQLS | (SEQ ID NO: 479) |
| LRDILYISTIVPKMLVDQVMSQRAISFAGCTAQHFLYLTLAGAEFFLLGLMSYDRYVAICNPLH | |
| YPVLMSRKICWLIVAAAWLGGSIDGFLLTPVTMQFPFCASREINHFFCEVPALLKLSCTDTSAY | |
| ETAMYVCCIMMLLIPFSVISGSYTRILITVYRMSEAEGRGKAVATCSSHMVVVSLFYGAAMYT | |
| YVLPHSYHTPEQDKAVSAYYTILTPMLNPLIYSLRNKDVTGALQKVVGRCVSSGKVTTF. | |
| ATGGAGGAGAGCAATTATTCCGTGTATGCCGACTTTATCCTTCTGGGTTTCAGCAACG | (SEQ ID NG: 480) |
| CCCGTTTCCCCTGGCTTCTCTTTGCCCTCATTCTCCTGGTCTTTTTGACCTCCATAGCCAGC | |
| AACGTGGTCAAGATCATTCTCATCCACATAGACTCCCGCCTCCACACCCCCATGTACTTCCT | |
| GCTCAGCCAGCTCTCCCTCAGGGACATCCTGTATATTTCCACCATTGTGCCCAAAATGCTG | |
| GTCGACCAGGTGATGAGCCAGAGAGCCATTTCCTTTGCTGGATGCACTGCCCAACACTTCC | |
| TCTACTTGACCTTAGCAGGGGCTGAGTTGTTCCTCCTAGGACTCATGTCCTATGATCGCTAC | |
| GTAGCCATCTGCAACCCTCTGCACTATCCTGTGCTCATGAGGCGCkAGATCTGCTGGTTGA | |
| TTGTGGCGGCAGCCTGGCTGGGAGGGTCTATCGATGGTTTCTTGCTCACCCCGGTCACCAT | |
| GCAGTTCCCCTTCTGTGCCTCTCGGGAGATCAACCACTTCTTCTGCGAGGTGCCTGCCCTTC | |
| TGAAGCTCTCCTGCACGGACACATCAGCCTACGAGACAGCCATGTATGTCTGCTGTATTAT | |
| GATGCTCCTCATCCCTTTCTCTGTCATCTCGGGCTCTTACACAAGAATTCTCATTACTGTTT | |
| ATAGGATGAGCGAGGCAGAGGGGAGGGGAAAGGCTGTGGCCACCTGCTCCTCACACATGG | |
| TGGTTGTCAGCCTCTTCTATGGGGCTGCCATGTAGACATACGTGCTGCCTCATTCTTACCAC | |
| ACCCCTGAGCAGGACAAAGCTGTATCTGCCTTCTACACCATCCTTACTCCCATGCTCAATC | |
| CACTCATTTACAGCCTTAGGAACAAGGATGTCACAGGGGCCCTACAGAAGGTTGTGGGGA | |
| GGTGTGTGTCCTCAGGAAAGGTAACCACTTTCTAA. | |
| AOLFR256 sequences: | |
| MGGKQPWVTEFILVGFQVGPALAILLCGLFSVFYTLTLLGNGVIFGIICLDSKLHTPMYFFLSHL | (SEQ ID NO: 481) |
| AIIDMSYASNNVPKMLANLMNQKSTISFVPCIMQTFLYLAFAVTECLILVVMSYDRYVAICHPF | |
| QYTVIMSWRVCTILASTCWIISFLMALVHITHILRPPFCGPQKINHFICQLMSVFKLACAGPRLNQ | |
| VVLYAGSAFIVEGPLCLELVSNLHILSRHLEDPVMGRAADRLTLPAPSHLCMVGLLFGSTMVM | |
| YMAPKSRHPEEQQKVLSLFYSLFNPMLNPLIYSLRNAEVKGALKRVLWKQRSK. | |
| ATGGGAGGCAAGCAGCCCTGGGTCACAGAATTCATCCTGGTGGGATTCCAGGTTGGTCCA | (SEQ ID NO: 482) |
| GCACTGGCGATTCTCCTCTGTGGACTCTTCTCTGTCTTCTATACAGTCACCCTGCTGGGGAA | |
| TGGGGTCATCTTTGGGATTATCTGCCTGGACTCTAAGCTTCACACACCCATGTACTTCTTCC | |
| TCTCACACCTGGCCATCATTGACATGTCCTATGCTTCCAACAATGTTCCCAAGATGTTGGC | |
| AAACCTAATGAACCAGAAAAGCACCATCTCCTTTGTTCCATGCATAATGCAGACTTTTTTG | |
| TATTTGGCTTTTGCTGTTACAGAGTGCCTGATTTTGGTGGTGATGTCCTATGATAGGTATGT | |
| GGCCATCTGCCACCCTTTCCAGTACACTGTCATCATGAGCTGGAGAGTGTGCACGATCCTG | |
| GCCTCAACATGCTGGATAATTAGCTTTCTCATGGCTCTGGTCCATATAACTCATATTCTGG | |
| GCCGCCTTTTTGTGGCCCACAAAAGATCAACCACTTTATCTGTCAAATCATGTCCGTATTCA | |
| AATTGGCCTGTGCTGGCCCTAGGCTCAACCAGGTGGTCCTATATGCGGGTTCTGCGTTCAT | |
| CGTAGAGGGGCCGCTCTGCCTGGAGCTGGTCTCCAACTTGCACATCCTGTCGCGCCATCTT | |
| GAGGATCCAGTAATGGGGAGGGCCGCAGACCGACTTACTCTTCCTGCTCCTTCCCACCTTT | |
| GCATGGTGGGACTCCTTTTTGGCAGCACCATGGTCATGTACATGGCCCCCCAAGTCCCGCCA | |
| CCCTGAGGAGCAGCAGAAGGTCCTTTCCGTGTTTTACAGCCTTTTCAACCCGATGCTGAAC | |
| CCCTTGATCTACAGCCTGAGGAACGCAGAGGTCAAGGGTGCCCTGAAAAGAGTGTTGTGG | |
| AAACAGAGATCAAAGTGA. | |
| AOLFR257 sequences: | |
| MESNQTWITEVILLGFQVDPALELFLFGFFLLFYSLTLMGNGIILGLIYLDSRLHTPMYVFLSHL | (SEQ ID NO: 483) |
| AIVDMSYASSTVPKIMLANLVMHKKVISFAPCILQTFLYLAYAITECLILVMMCYDRYVAICHPL | |
| QYTLIMNWRVCTVLASTCWIFSFLLALVHITLILRLPFCGPQKINHFFCQIMSVFKLACADTRLN | |
| QVVLFAGSAFILVGPLCLVLVSYLHILVAILRIQSGEGRRKAFSTCSSHLCVVGLFFGSAIVMYM | |
| APKSSHSQERRKILSLFYSLFNPILNPLIYSLRNAEVKGALKRVLWKQRSM. | |
| ATGGAAAGCAATCAGACCTGGATCACAGAAGTCATCCTGTTGGGATTCCAGGTGGACCCA | (SEQ ID NO: 484) |
| GCTCTGGAGTTGTTCCTCTTTGGGTTTTTCTTGCTATTCTACAGCTTAACCCTGATGGGAAA | |
| TGGGATTATCCTGGGGCTCATCTACTTGGACTCTAGACTGCACACACCCATGTATGTCTTC | |
| CTGTCACACCTGGCCATTGTGGACATGTCGTATGCCTCGAGTACTGTCCCTAAGATGCTAG | |
| CAAATCTTGTGATGCACAAK&AAGTCATCTCCTTTGCTCCTTGCATACTTCAGACTTTTTTG | |
| TATTTGGCGTTTGCTATTACAGAGTGTCTGATTTTGGTGATGATGTGCTATGATCGGTATG | |
| TGGCAATCTGTCACCCCTTGCAATACACCCTCATTATGAACTGGAGAGTGTGCACTGTCCT | |
| GGCCTCAACTTGCTGGATATTTAGCTTTCTCTTGGCTCTGGTCCATATTACTCTTATTCTGA | |
| GGCTGCCTTTTTGTGGCCCACAAAGATCAACCACTTTTTCTGTCAAATCATGTCCGTATTC | |
| AAATTGGCCTGTGCTGACACTAGGCTCAACCAGGTGGTCCTATTTGCGGGTTCTGCGTTCA | |
| TCTTAGTGGGGCCGCTCTGCGTGGTGCTGGTCTCCTACTTGCACATCCTGGTGGCCATCTTG | |
| AGGATCCAGTGTGGGGAGGGCCGCAGAAAGGCCTTCTGTACCTGGTCCTCCCACCTCTGCG | |
| TGGTGGGGCTTTTCTTTGGCAGCGCCATTGTCATGTACATGGCCCCCAAGTCAAGCCATTC | |
| TCAAGAACGGAGGAAGATCCTTTCCCTGTTTTACAGCCTTTTCAACCCGATCCTGAACCCC | |
| CTCATCTACAGCCTTAGGAATGCAGAGGTGAAAGGGGCTCTAAAGAGAGTCCTTTGGAAA | |
| CAGAGATCAATGTGA. | |
| AOLFR259 sequences: | |
| MGDNQSRVTEFILVGFQLSVEMEVLLFWIFSLLYLFSLLANGMILGLICLDPRLRTPMYFFLSHL | (SEQ ID NO: 485) |
| AVIDIYYASSNLLNMLENLVKKTISFISCIMQMALYLTFAAAVCMILVVMSYDRFVAICHPL | |
| HYTVIMNWRVCTVLAITSWACGFSLALINLILLLRLPFCGPQEVNFFGEILSVLKLACADTWIN | |
| EIFVFAGGVFVLVGPLSLMLISYMRILLAILKIQSKEGRKKAFSTCSSHLCVVGLYFGMAMVVY | |
| LVPDNSQRQKQQKILTLFYSLFNPLLNPLIYSLRNAQVKGALYRALQKKRTM. | |
| ATGGGGGACAACCAATCACGGGTCACAGAATTCATCCTGGTTGGATTCCAGCTCAGTGTG | (SEQ ID NO: 486) |
| GAGATGGAAGTGCTCCTCTTCTGGATCTTCTCCCTGTTATATCTCTTCAGCCTGCTGGCAAA | |
| TGGCATGATCTTGGGGCTCATCTGTCTGGATCCCAGACTGCGCACCCCCATGTACTTCTTCC | |
| TGTCACACTTGGCCGTCATTGACATATACTATGCTTCCAGCAATTTGCTCAACATGCTGGA | |
| AAACCTAGTGAAACACAAAAAAACTATCTCGTTCATCTCTTGCATTATGCAGATGGCTTTG | |
| TATTTGACTTTTGCTGCTGCAGTGTGCATGATTTTGGTGGTGATGTCCTATGACAGATTTGT | |
| GGCGATCTGCCATCCCCTGCATTACACTGTCATCATGAACTGGAGAGTGTGCACAGTACTG | |
| GCTATTACTTCCTGGGCATGTGGATTTTCCCTGGCCCTCATAAATCTAATTCTCCTTCTAAG | |
| GCTGCCCTTCTGTGGGCCCCAGGAGGTGAACCACTTCTTCGGTGAAATTCTGTCTGTCCTC | |
| AAACTGGCCTGTGCAGACACCTGGATTAATGAAATTTTTGTCTTTGCTGGTGGTGTGTTTG | |
| TCTTAGTCGGGCCCCTTTGCTTGATGCTGATGTCCTACATGCGCATCCTCTTGGCCATCCTG | |
| AAGATCCAGTCAAAGGAGGGGCGCAAAAAAGCCTTTTCCACCTGCTCCTCCCACCTCTGTG | |
| TGGTTGGGCTTTACTTTGGCATGGCGATGGTGGTTTACCTGGTCCCAGACAACAGTCAACG | |
| ACAGAAGCAGCAGAAAATTCTCACCCTGTTTTACAGCCTTTTCAACCCATTGCTGAACGCC | |
| CTCATCTACAGCCTGCGGAATGCTCAAGTGAAGGGTGCCTTATACAGAGCACTGCAGAAA | |
| AAGAGGACCATGTGA. | |
| AOLFR24B sequences: | |
| MPSINDTHFYPPFFLLLGIPGLDTLHIWISFPFCIVYLIAIVGNMTILFVIKTEHSLHQPMFYFLAM | (SEQ ID NO: 487) |
| LSMIDLGLSTSTIPKMLGIFWFNLQEISFGGCLLQMFFIHMFTGMETVLLVVMAYDRFVAICNP | |
| LQYTMILTNKTISILASVVVGRNLVLVTPFVFLILRIPFCGHNIVPHTYCEHGLAGLACAPIKIN | |
| IIYGLMVISYIIVDVILIASSYVLILRAVFRLPSQDVRLKAFNTCGSHVCVMLCFYTPAFFSFMTH | |
| RFGQNIPHYIHILLANLYVVVPPALNPVIYGVRTKQIREQIVKIFVQKE | |
| ATGCCTTCTATCAATGACACCCACTTCTATCCCCCCTTCTTCCTCCTGCTAGGAATACCAGG | (SEQ ID NO: 488) |
| ACTGGACACTTTACATATCTGGATTTCTTTCCCATTCTGTATTGTGTACCTGATTGCCATTG | |
| TGGGGAATATGACCATTCTCTTTGTGATCAAAACTGAACATAGTCTACACCAGCCCATGTT | |
| CTACTTCCTGGCCATGTTGTCTATGATTGATCTGGGTCTGTCCACATCGAGTATCCCCATGTT | |
| TGCTAGGAATCTTCTGGTTCAACCTCCAAGAGATCAGCTTTGGGGGATGCCTTGTTCAGAT | |
| GTTCTTTATTCACATGTTTACAGGCATGGAGACTGTTCTGTTGGTGGTCATGGCTTATGACC | |
| GCTTTGTTGCCATCTGCAACCCTCTCCAGTACACCATGATCCTCACCAATAAAACCATCAG | |
| TATCCTAGCTTCTGTGGTTGTTGGAAGAATTTAGTTCTTGTAACCCCATTTGTGTTTCTCA | |
| TTCTGCGTCTGCCATTCTGTGGGCATAACATCGTACCTCACACATACTGTGAGCACAGGGG | |
| TCTGGCCGGGTTGGCCTGTGCACCCATTAAGATCAACATAATCTATGGGCTCATGGTGATT | |
| TCTTATATTATTGTGGATGTGATCTTAATTGCCTCTTCCTATGTGCTTATCCTTAGAGCTGT | - |
| TTTTCGCCTTCCCTCTCAAGATCTCCGACTAAAGGCCTTCAATACCTGTGGTTCTCATGTCT | |
| GTGTTATGCTGTGCTTTTACACACCAGCATTTTTTTCTTTTATGACACATCGTTTTGGCCAA | |
| AACATTCCCCACTATATCCATATTCTTTTGGCTAACCTGTATGTGGTTGTGCCACCTGCCCT | |
| TAACCCTGTCATTTATGGAGTCAGGACCAAGCAGATCCGAGAGCAAATTGTGAAAATATTT | |
| GTACAGAAAGAATAA | |
| AOLFR33B sequences: | |
| MLHTNNTQFHPSTFLVVGVPGLEDVHVWIGFPFFAVYLTALLGMIILFVIQTEQSLHQPMFYFL | (SEQ ID NO: 489) |
| AMLAGTDLGLSTATIPKALGIFWFNLGEIAYGACITQMYTIHICTGLESVVLTVTGIDRYIAICNP | |
| LRYSMILTNKVIAILGIVIIVRTLVFVTPFTFLTLRLPFCGVRIIHTYCEHMGLAKLACASINVIY | |
| GLIAFSVGYIDISVIGFSYVQILRAVFHLPAWDARLKALSTCGSHVCVMLAFYLPALFSFMTHRF | |
| GHNIPHYIHILLANLYVVFPPALNSVIYGVKTKQIREQVLRILNPKSFWHFDPKRIFHNNSVRQ | |
| ATGCTTCATACCAACAATACACAGTTTCACCCTTCCACCTTCCTCGTAGTGGGGGTCCCAG | (SEQ ID NO: 490) |
| GGCTGGAAGATGTGCATGTATGGATTGGCTTCCCCTTCTTTGCGGTGTATCTAACAGCCCT | |
| TCTAGGGAACATCATTATCCTGTTTGTGATACAGACTGAACAGAGCCTCCACCAACCCATG | |
| TTTTACTTCCTAGCCATGTTGGCCGGCACTGATCTGGGCTTGTCTACAGCAACCATCCCCA | |
| AGATGCTGGGAATTTTCTGGTTTAATCTTGGAGAGATTGCATTTGGTGCCTGCATCACACA | |
| GATGTATACCATTGATATATGCACTGGCCTGGAGTCTGTGGTACTGACAGTCACGGGCATA | |
| GATCGCTATATTGCCATCTGCAAGCCCCTGAGATATAGCATGATCCTTACCAACAAGGTAA | |
| TAGCCATTCTGGGCATAGTCATCATTGTCAGGACTTTGGTATTTGTGACTCCATTCACATTT | |
| CTCACCCTGAGATTGCCTTTCTGTGGTGTCCGGATTATCCCTCATACCTATTGTGAACACAT | |
| GGGCTTGGCAAAGTTAGCTTGTGCCAGTATTAATGTTATATATGGATTGATTGCCTTCTCA | |
| GTGGGATACATTGACATTTCTGTGATTGGATTTTCCTATGTCCAGATCCTCCGAGCTGTCTT | |
| CCATCTCCCAGCCTGGGATGCCCGGGTTAAGGCACTCAGCACATGTGGCTCTCACGTCTGT | |
| GTTATGTTGGCTTTCTACCTGCCAGCCCTCTTTTCCTTCATGACACACCGCTTTGGCCACAA | |
| CATCCCTCATTACATCCACATTCTTCTGGCCAATCTGTATGTGGTTTTTCCCCCTGCTCTTA | |
| ACTCTGTTATCTATGGGGTCAAAACAAAACAGATACGAGAGCAGGTACTTAGGATACTCA | |
| ACCCTAAAAGCTTTTGGCATTTTGACCCCAAGAGGATCTTCCACAACAATTCAGTTAGACA | |
| ATAA | |
| AOLFR112B sequences: | |
| MKNKTVLTEFILLGLTDVPELQVAVFTFLFLAYLLSILGNLTILILTLLDSHLQTPMYFFLRNFSF | (SEQ ID NO: 491) |
| LEISFTNIFIPRVLISITTGNKSISFAGCFTQYFFAMFLGATEFYLLAAMSYDRYVAICKPLHYTTI | |
| MSSRICIQLIFCSWLGGLMAIIPTITLMSQQDFCASNRLNHYFCDYEPLLELSCSDTSLIEKVVFL | |
| VASVTLVVTLVLVILSYAFIIKTILKLPSAQQRTKAFSTCSSHMIVISLSYGSCMFMYINPSAKEG | |
| DTFNKGVALLITSVAPLLNPFIYTLRNQQVKQPFKDMVKKLLNL | |
| ATGAAAAATAAAACCGTGTTAACTGAGTTTATCCTTCTGGGTCTAACAGATGTCCCTGAAC | (SEQ ID NO: 492) |
| TCCAGGTGGCAGTTTTCACCTTTCTTTTCCTTGCGTATTTACTCAGCATCCTTGGAAATCTG | |
| ACTATCCTCATCCTCACCTTGCTGGACTCCCACCTTCAGACTCCCATGTATTTCTTTCTCCG | |
| GAACTTCTCCTTCTTGGAAATTTCCTTCACAAACATCTTCATTCCAAGGGTCCTGATTAGCA | |
| TCACAACAGGGAACAAGAGTATCAGCTTTGCTGGCTGCTTCACTCAGTATTTCTTTGCCAT | |
| GTTCCTTGGGGCTACAGAGTTTTACCTTCTGGCTGCCATGTCCTATGACCGCTATGTGGCC | |
| ATCTGCAAACCTCTGCATTACACCACCATCATGAGCAGCAGAATCTGCATCCAGCTGATTT | |
| TCTGCTCTTGGCTGGGTGGGCTAATGGCTATTATACCAACAATCACCCTGATGAGTCAGCA | |
| GGACTTTTGTGCATCCAACAGACTGAATCATTACTTCTGTGACTATGAGCCTCTTCTGGAA | |
| CTCTCATGTTCAGACACAAGCCTCATAGAGAAGGTTGTCTTTCTTGTGGCATCTGTGACCC | |
| TGGTGGTCACTCTGGTGCTAGTGATTCTCTCCTATGCATTCATTATCAAGACTATTCTGAAG | |
| CTCCCCTCTGCCCAACAAAGGACAAAAGCCTTTTCCACATGTTCTTCCCACATGATTGTCAT | |
| CTCCCTCTCTTACGGAAGCTGCATGTTTATGTACATTAATCCCTCTGCAAAAGAAGGGGAT | |
| ACATTCAACAAGGGAGTAGCTCTACTCATTACTTCAGTTGCTCCTTTGTTGAACCCCTTTAT | |
| TTACACCCTAAGGAACCAACAGGTAAAACAACCCTTCAAGGATATGGTCAAAAAGCTTCT | |
| GAATCTTTAA | |
| AOLFR130B sequences: | |
| MEGKNQTAPSEFIILGFDHLNELQYLLFTIFFLTYICTLGGNVFIIVVTIADSHLHTPMYYFLGNL | (SEQ ID NO: 493) |
| ALIDICYTTTNVPQMMVHLLSEKKIISYGGCVTQLFAFIFFVGSECLLLAAMAYDRYIAICKPLR | |
| YSFIMNKALCSWLAASCWTCGFLNSVLHTVLTFHLPFCGNNQINYFFCDIPPLLILSCGDTSLNE | |
| LALLSIGILISWTPFLCIILSYLYIISTILRIRSSEGRHKAFSTCASHLLIVILYYGSAIFTYVRPISSYS | |
| LEKDRLISVLYSVVTPMLNPVIYTLRTKDIKEAVKAIGRKWQPPVSSDI | |
| ATGGAAGGAAAGAATCAAACAGCTCCATCTGAATTCATCATCTTGGGGTTCGACCACCTGA | (SEQ ID NO: 494) |
| ATGAATTGCAGTATTTACTCTTCACCATCTTCTTTCTGACCTACATATGCACTTTAGGAGGC | |
| AATGTTTTTATCATTGTGGTGACCATAGCTGATTCCCACCTACACACACCCATGTATTATTT | |
| CCTAGGAAATCTTGCCCTTATTGACATCTGCTACACTACTACTAATGTCCCCCAGATGATG | |
| GTGCATCTTCTGTCAGAGAAGAAAATCATTTCCTATGGAGGCTGTGTGACCCAGCTCTTTG | |
| CATTCATTTTCTTTGTTGGCTCAGAGTGTCTCCTCCTGGCAGCAATGGCATATGATCGATAT | |
| ATTGCTATCTGTAAGCCGTTAAGGTACTCATTTATTATGAACAAGGCCCTGTGCAGCTGGT | |
| TAGCAGCCTCATGCTGGACATGTGGGTTTCTCAACTCAGTGTTGCACACCGTTCTGACCTT | |
| CCACCTGCCCTTCTGTGGTAACAATCAGATCAATTATTTCTTCTGTGACATACCTCCCTTGC | |
| TCATCTTGTCTTGTGGTGATAGTCCCTCAATGAACTGGCTTTGCTGTCCATTGGGATCCTC | |
| ATAAGCTGGACTCCTTTCCTGTGCATCATCCTTTCCTACCTTTACATCATCTCCACCATGCT | |
| GAGGATCCGTTCCTCTGAGGGGAGGCACAAAGCCTTTTCCACCTGTGCCTCCCACCTGCTC | |
| ATTGTTATTCTCTATTATGGCAGTGCTATCTTCACGTATGTGAGGCCCATCTCATCTTACTC | |
| TCTAGAGAAAGATAGATTGATGTCAGTGCTGTATAGTGTTGTCACACCCATGCTGAATCCT | |
| GTAATTTATACGCTAAGGAATAAGGACATCAAAGAGGCTGTGAAGGCCATAGGGAGAAAG | |
| TGGCAGCCACCAGTTTTCTCTTCTGATATATAA | |
| AOLFR142B sequences: | |
| MARKDMAHINCTQATEFILVGLTDHQELKMPLFVLFLSIYLFTVVGNLGLILLIRADTSLNTPM | (SEQ ID NO: 495) |
| YFFLSNLAFVDFCYSSVITPKMLGNFLYKQNVISFDACATQLGCFLTFMISESLLLASMAYDRY | |
| VAICNPLLYMVVMTPGICIQLVAVPYSYSFLMALFHTILTFRLSYCHSNIVNHFYCDDMPLLRL | |
| TCSDTRFKQLWIFACAGIMFISSLLIVFVSYMFIISAILRMHSAEGRQKAFSTCGSHMLAVTIFYG | |
| TLIFMYLQPSSSHALDTDKMASVFYTVIIPMLNPLIYSLQNKEVKEALKKIIINKN | |
| ATGGCCAGAAAAGATATGGCTCACATCAATTGCACCCAGGCGACAGAGTTTATTCTTGTGG | (SEQ ID NO: 496) |
| GCCTCACAGACCATCAGGAGTTGAAGATGCCCCTCTTTGTGCTATTCTTATCCATCTACCTC | |
| TTCACAGTGGTAGGCAACTTGGGTTTGATCCTACTCATTAGAGCGGATACAAGTCTCAACA | |
| CACCAATGTACTTCTTTCTTAGCAACCTAGCTTTTGTGGATTTCTGTTACTCTTCTGTCATT | |
| ACACCCAAAATGCTTGGGAATTTCTTGTACAAACAAAATGTTATATCCTTTGATGCATGTG | |
| CTACTCAACTGGGCTGCTTTCTCACCTTCATGATATCAGAATCCTTGCTACTGGCTTCCATG | |
| GCCTATGACCGATATGTGGCCATTTGTAACCCTCTATTGTATATGGTTGTAATGACTCCAG | |
| GAATCTGCATTCAACTTGTAGCAGTTCCTTATAGCTATAGCTTCCTAATGGCACTATTTCAC | |
| ACCATCCTCACCTTCCGCCTCTCCTATTGCCACTCCAACATTGTCAACCATTTCTATTGTGA | |
| TGACATGCCTCTCCTCAGGCTAACTTGCTCAGACACTCGCTTCAAACAGCTCTGGATCTTT | |
| GCCTGTGCTGGTATCATGTTCATTTCCTCCCTTCTGATTGTCTTTGTCTCCTACATGTTCATC | |
| ATTTCTGCCATCCTGAGGATGCATTCAGCTGAGGGAAGACAGAAGGCTTTCTCGACGTGTG | |
| GCTCTCACATGCTGGCAGTCACCATATTCTATGGGACCCTCATTTTTATGTACTTACAGCCT | |
| AGCTCTAGCCATGCCCTGGACACAGACAAGATGGCCTCTGTCTTCTACACAGTGATCATTC | |
| CCATGTTGAATCCCTTAATCTATAGCCTCCAGAATAAGGAGGTGAAAGAAGCTCTGAAGA | |
| AAATCATTATCAATAAAAACTAG | |
| AOLFR171C sequences: | |
| MAEVNIIYVTVFILKGITNRPELQAPCFGVFLVIYLVTVLGNLGLITLIKIDTRLHTPMYYFLSHL | (SEQ ID NO: 497) |
| AFVDLCYSSAITPKMMVNFVVERNTIPFHACATQLGCFLTFMITECFLLASMAYDCYVIAICSPL | |
| HYSTLMSRRVCIQLVAVPYIYSFLVALFHTVITFRLTYCGPNLINHFYCDDLPFLALSCSDTHMK | |
| EILIFAFAGFDMISSSSIVLTSYIFIIAAILRIRSTQGQHKAISTCGSHMVTVTIFYGTLIFMYLQPKS | |
| NHSLDTDKMASVFYTVVIPMLNPLIYSLRNKEVKDASKKALDKGCENLQILTFLKIRKLY | |
| ATGGCTGAAGTTAATATCATTTATGTCACTGTATTCATTCTGAAAGGTTACCAACCGGC | (SEQ ID NO: 498) |
| CAGAGCTTCAGGCCCCGTGCTTTGGGGTGTTTTTAGTTATCTATCTGGTCACAGTGCTGGG | |
| CAATCTTGGGTTGATTACTTTAATCAAGATTGATACTCGACTCCACACACCTATGTACTATT | |
| TCCTCAGCCACCTGGCCTTTGTTGACCTTTGTTACTCCTCTGCTATTACACCGAAGATGATG | |
| GTGAATTTTGTTGTGGAACGCAACACCATTCCTTTCCATGCTTGTGCAACCCAACTGGGTT | |
| GTTTTCTCACCTTCATGATCACTGAGTGTTTCCTTCTAGGCTCCATGGCCTACGATTGCTAT | |
| GTCGCCATCTGTAGTCCCCTGCATTATTCAACACTGATGTCAAGAAGAGTCTGCATTCAAC | |
| TGGTGGCAGTTCCATATATATACAGCTTCCTGGTTGCCCTCTTCCACACCGTTATCACTTTC | |
| CGTCTGACTTACTGTGGCCCAAACTTAATTAACCATTTCTATTGTGATGACCTCCCCTTCTT | |
| AGCTCTGTCCTGCTCAGACACACACATGAAGGAAATTCTGATATTTGCCTTTGCTGGCTTT | |
| GATATGATCTCTTCCTCTTCCATTGTCCTCACCTCCTACATCTTTATTATTGCCGCTATCCTA | |
| AGGATCCGCTCTACTCAGGGGCAACACAAAGCCATTTCCACGTGTGGCTCCCATATGGTGA | |
| CTGTCACTATTTTCTATGGCACACTGATCTTTATGTACCTACAGCCCAAATCAAATCACTCC | |
| TTGGACACAGACAAGATGGCTTCTGTATTTTACACAGTGGTGATCCCCATGTTAAACCCCC | |
| TAATCTATAGTCTAAGGAACAAAGAAGTGAAAGATGCCTCAAAGAAAGCCTTGGATAAAG | |
| GTTGTGAAAACTTACAGATATTAACATTTTTAAAAATAAGAAAACTTTATTAA | |
| AOLFR225B sequences: | |
| MKNRTMFGEFILLGLTNQPELQVMIFIFLFLTYMLSILGNLTIITLTLLDPHLQTPMYFFLRNSF | (SEQ ID NO: 499) |
| LEISFTSIFIPRFLTSMTTGNKVISFAGCLTQYFFAIFLGATEFYLLASMSYDRYVAICKPLHYLTI | |
| MSSRVCIQLVFCSWLGGFLAILPPIILMTQVDFCVSNILNIIYYCDYGPLVELACSDTSLLELMVI | |
| LLAVVTLMVTLVLVTLSYTYIIRTILRIPSAQQRTKAFSTCSSHMIVISLSYGSCMFMYINPSAKE | |
| GGAFNKGIAVLITSVTPLLNPFIYTLRNQQVKQAFKDSVKKIVKL | |
| ATGAAAAACAGAACCATGTTTGGTGAGTTTATTCTACTGGGCCTTACAAATCAACCTGAAC | (SEQ ID NO: 500) |
| TCCAAGTGATGATATTCATCTTTCTGTTCCTCACCTACATGCTAAGTATCCTAGGAAATCTG | |
| ACTATTATCACCCTCACCTTACTAGACCCCCACCTCCAGACCCCCATGTATTTCTTCCTCCG | |
| GAATTTCTCCTTCTTAGAAATTTCCTTCACATCCATTTTTATTCCCAGATTTCTGACCAGCA | |
| TGACAACAGGAAATAAAGTTATCAGCTTTGCTGGCTGCTTGACTCAGTATTTTTTTGCTAT | |
| ATTTCTTGGAGCTACCGAGTTTTACCTCCTGGCCTCCATGTCTTATGATCGTTATGTGGCCA | |
| TCTGCAAACCCTTGCATTACCTGACTATTATGAGCAGCAGAGTCTGCATACAACTAGTGTT | |
| CTGCTCCTGGTTGGGGGGATTCCTAGCAATCTTACCACCAATCATCCTGATGACCCAGGTA | |
| GATTTCTGTGTCTCCAACATTCTGAATCACTATTACTGTGACTATGGGCCTCTCGTGGAGCT | |
| TGCCTGCTCAGACACAAGCCTCTTAGAACTGATGGTCATCCTCTTGGCCGTTGTGACTCTC | |
| ATGGTTACTCTGGTGCTGGTGACACTTTCTTACACATACATTATCAGGACTATTCTGAGGA | |
| TCCCTTCTGCCCAGCAAAGGACAAAGGCCTTTTCCACTTGTTCCTCCCACATGATTGTCATC | |
| TCCCTCTCTTATGGCAGCTGCATGTTTATGTACATTAATCCTTCTGCAAAAGAAGGAGGTG | |
| CTTTCCGGAATAGCTGTACTCATTACTTCGGTTACTCCCTTACTGAATCCCTTCATA | |
| TATACTTTAAGAAATCAGCAAGTGAAACAAGCTTTCAAGGACTCAGTCAAAAAGATTGTG | |
| AAACTTTAA | |
| AOLFR274B sequences: | |
| MEFVFLAYPSCPELHILSFLGVSLVYGLIITGNILIVVSIHTETCLCTSMYYFLGSLSGIEICYTAV | (SEQ ID NO: 501) |
| VVPHILANTLQSEKTITLLGCATQMAFFIALGSADCFLLAAMAYDRYVAICHPLQYPLLMTLTL | |
| CVHLVVASVISGLFLSLQLVAFIFSLPFCQAQGIEHFFCDVPPVMHVVCAQSHIHEQSVLVAAIL | |
| AIAVPFFLITTSYTFIVAALLKIHSAAGRHRAFSTCSSHLTVVLLQYGCCAFMYLCPSSSYNPKQ | |
| DRFISLVYTLGTPLLNPLIYALRNSEMKGAVGRVLTRNCLSQNS | |
| ATGGAATTTGTGTTCCTGGCCTATGCCTCCTGCCCAGAACTGCATATTCTGTCCTTCCTTGG | (SEQ ID NO: 502) |
| GGTCAGCCTGGTTTATGGTTTGATCATCACTGGGAAGATTCTCATTGTGGTGTCCATTCAC | |
| ACAGAAACCTGTCTATGCACATCCATGTACTATTTCCTGGGCAGCCTTTCTGGGATTGAAA | |
| TATGCTACACTGCAGTGGTGGTGCCCCATATCCTGGCCAACACCCTACAGTCAGAGAAGAC | |
| CATCACTCTCCTGGGCTGTGCCAGCCAGATGGCTTTCTTCATTGCACTGGGCAGTGCTGAT | |
| TGCTTCCTCTTGGGTGCCATGGCCTATGACCGCTATGTGGCCATTTGCCACCCGTTGCAGTA | |
| CCCTCTCCTCATGACATTGACTGTTTGTGTCCACTTGGTTGTGGCATCAGTCATCAGTGGTC | |
| TGTTCCTGTCCTTACAACTGGTGGCCTTCATCTTCTCTCTGCCATTCTGCCAGGCTCAGGGC | |
| ATTGAGCACTTCTTTTGTGATGTGCCACCAGTCATGCATGTTGTTTGTGCTCAGAGTCACAT | |
| TCATGAGCAGTCAGTGCTGGTGGCAGCCATACTAGCCATTGCTGTGCCTTTCTTCCTCATC | |
| ACCACCTCCTACACCTTCATAGTGGCTGCTCTGCTCAAGATCCACTCGGCTGCTGGCCGCC | |
| ACCGGGCCTTCTCCACCTGCTCTTCCCACCTCACTGTGGTGCTGCTGCAGTATGGCTGCTGT | |
| GCCTTCATGTACCTGTGCCCCAGCTCCAGCTACAACCCCAAGCAAGATCGGTTCATCTCAC | |
| TGGTGTACACATTGGGAACCCCACTGCTCAACCCACTTATCTATGCCCTGAGGAACAGTGA | |
| GATGAAAGGGGCCGTAGGGAGAGTTCTTACCAGGAACTGCCTTTCCCAGAACAGCTAG | |
| AOLFR276B sequences: | |
| MGGFGTNISSTTSFTLTGFPEMKGLEHWLAALLLLLYAISFLGNILILFIIKEEQSLHQPMYYFLS | (SEQ ID NO: 503) |
| LFSVNDLGVSFSTLPTVLAAVCFHAPETTFDACLAQMFFIHFSSWTEFGILLAMSFDHYVAICNP | |
| LRYATVLTDVRVAHNGISIVIRSFCMVFPLPFLLKRLPFCKASVVLAHSYCLHADLIRLPWGDT | |
| TINSMYGLFIVISAFGVDSLLILLSYVLILHSVLAIASRGERLKTLNTCVSHIYAVLIFYVPMVSVS | |
| MVHRFGRHAPEYVHKFMSLCTSNALPNYLFHQD | |
| ATGGGGGGCTTTGGGACTAACATCTCAAGTACTACCAGCTTCACTCTAACAGGCTTCCCTG | (SEQ ID NO: 504) |
| AGATGAAGGGTCTGGAGCACTGGCTGGCTGCCCTTCTGCTGCTGCTTTATGGTATTTCCTT | |
| CCTGGGCAACATCCTCATCCTCTTTATCATAAAGGAAGAGCAGAGCTTGCACCAGCCAATG | |
| TACTACTTCCTGTCTCTTTTTTCTGTTAATGACCTGGGTGTGTCCTTTTCTACATTGCCCACT | |
| GTACTGGCTGCTGTGTGTTTTCATGCCGCAGAGACAACTTTTGATGCCTGCCTGGCCCAGA | |
| TGTTCTTCATCCACTTTTCCTCCTGGACAGAGTTTGGCATCCTACTGGCCATGAGTTTTGAC | |
| CACTATGTGGCCATCTGTAACCCGCTGCGCTATGCCACAGTGCTCACTGATGTCCGTGTGG | |
| CCCACAATGGCATATCCATTGTCATCCGCAGCTTCTGCATGGTATTCCCACTTCCCTTCCTC | |
| CTGAAGAGACTGCCTTTGTGTAAGGCCAGTGTGGTACTGGCCCATTCCTAGTGTCTGCATG | |
| CAGACCTGATTCGGCTGCCCTGGGGAGACACTACCATCAACAGCATGTATGGCCTGTTCAT | |
| TGTCATCTCTGCCTTTGGTGTAGATTCACTGCTCATCCTCCTCTCCTATGTGCTCATTGTAC | |
| ATTCTGTGCTGGCCATTGCCTCCAGGGGTGAGAGGCTTAAGACACTCAACACATGTGTGTC | |
| ACATATCTATGCAGTGCTGATCTTCTATGTGCGTATGGTTAGTGTGTCCATGGTTCATGGAT | |
| TTGGGAGGCATGCTCCTGAATATGTGCACAAGTTCATGTCTCTTTGTACCTCCAATGCTCT | |
| ACCCAATTATCTATTCCATCAAGACTAA | |
| AOLFR311B sequences: | |
| MDWENCSSLTDFFLLGITNNPEMKVTLFAVFLAVYINFSANLGMIVLIRMDYQLHTPMYFFLS | (SEQ ID NO: 505) |
| HLSFCDLCYSTATGPKMLVDLLAKNKSIPFYGCALQFLVFCIFADSECLLLSVMAFDRYKAIINP | |
| LLYTVNMSSRVCYLLLTGVYLVGIADALIHMTLAFRLCFCGSNEINHFFCDIPPLLLLSRSDTQV | |
| NELVLFTVFGFIELSTISGVFISYCYIILSVLEIHSAEGRFKALSTCTSHLSAVAIFQGTLLFMTFRP | |
| SSSYSLDQDKMTSLFYTLVVPMLNPLIYSLRNKDVKEALKKLKNKILF | |
| ATGGACTGGGAAAATTGCTCCTCATTAACTGATTTTTTTCTCTTGGGAATTACCAATAACCC | (SEQ ID NO: 506) |
| AGAGATGAAAGTGACCCTATTTGCTGTATTCTTGGCTGTTTATATCATTAATTTCTCAGCAA | |
| ATCTTGGAATGATAGTTTTAATCAGAATGGATTACCAACTTCACACACCAATGTATTTCTT | |
| CCTCAGTCATCTGTCTTTCTGTGATCTCTGCTATTCTACTGCAACTGGGCCCAAGATGCTGG | |
| TAGATCTACTTGCCAAGAACAAGTCAATACCCTTCTATGGCTGTGCTCTGCAATTCTTGGT | |
| CTTCTGTATCTTTGCAGATTCTGAGTGTCTACTGCTGTCAGTGATGGCCTTTGATGGGTACA | |
| AGGCCATCATCAACCCCCTGCTCTATACAGTCAACATGTCTAGCAGAGTGTGCTATCTACT | |
| CTTGACTGGGGTTTATCTGGTGGGAATAGCAGATGCTTTGATACATATGACACTGGCCTTC | |
| CGCCTATGCTTCTGTGGGTCTAATGAGATTAATCATTTCTTCTGTGATATCCCTCCTCTCTT | |
| ATTAGTCTCTCGCTCAGATACACAGGTCAATGAGTTAGTGTTATTCACCGTCTTTGGTTTTA | |
| TTGAACTGAGTACCATTTCAGGAGTTTTCATTTCTTATTGTTATATCATCCTATCAGTCTTG | |
| GAGATACACTGTGCTGAGGGGAGGTTCAAAGCTCTCTCTACATGCACTTCCCACTTATCTG | |
| CGGTTGCAATTTTCCAGGGAACTCTGCTCTTTATGTATTTCCGGCCAAGTTCTTCCTATTCT | |
| CTAGATCAAGATAAAATGACCTCATTGTTTTACACCCTTGTGGTTCCCATGTTGAACCCCCT | |
| GATTTATAGCCTGAGGAACAAGGATGTGAAAGAGGCCCTGAAAAAACTGAAAAATAAAAT | |
| TTTATTTTAA | |
| AOLFR314 sequences: | |
| MEVKNCCMVTEFILLGIPHTEGLEMTLFVLFLPFYACTLLGNVSILVAVMSSARLHTPMYFFLG | (SEQ ID NO: 507) |
| NLSVFDMGFSSVTCPKMLLYLMGLSRLISYKDCVCQLFFHFLGSIECFLFTVMAYDRFTAICY | |
| PLRYTVIMNPRICVALAVGTWLLGCIHSSILTSLTFTLPYCGPNEVDHFFCDIPALLPLACADTSL | |
| AQRVSFTNVGLISLVCFLLILLSYTRITISILSIRTTEGRRRAFSTCSAHLIAILCAYGPIITVYLQPT | |
| PNPMLGTVVQILMNLVGPMLNPLIYTLRNKEVKTALKTILHRTGHVPES | |
| ATGGAGGTGAAGAACTGCTGCATGGTGACAGAGTTCATCCTTTTGGGAATCCCACACACA | (SEQ ID NO: 508) |
| GAGGGGCTGGAGATGACACTTTTTGTCTTATTCTTGCCCTTCTATGCCTGCACTGTACTGGG | |
| AAATGTGTCTATCCTTGTTGCTGTTATGTCTTCTGCTCGCCTTCACACACCTATGTATTTCT | |
| TCCTGGGAAACTTGTCTGTGTTTGACATGGGTTTCTCCTGAGTGACTTGTCCCAAAATGCT | |
| GCTCTACCTTATGGGGCTGAGCCGACTCATCTCCTACAAAGACTGTGTCTGCCAGCTTTTCT | |
| TCTTCCATTTCCTCGGGAGCATTGAGTGCTTCTTGTTTACGGTGATGGCCTATGACCGCTTC | |
| ACTGCCATCTGTTATCCTCTGCGATACACAGTCATCATGAACCCAAGGATCTGTGTGGCCC | |
| TGGCTGTGGGCACATGGCTGTTAGGGTGCATTCATTCCAGTATCTTGACCTCCCTCACCTTC | |
| ACCTTGCCATAGTGTGGTCCCAATGAAGTGGATCACTTCTTCTGTGACATTCCAGCACTGTT | |
| GCCCTTGGCCTGTGCTGACACATCCTTAGCCCAGAGGGTGAGCTTCACCAACGTTGGCCTC | |
| ATATCTCTTGTCTGCTTTCTGCTAATTCTTTTATCCTACACTAGAATCACAATATCTATCTT | |
| AAGCATTCGTACAACTGAGGGCCGTCGCCGTGCCTTCTCCACCTGCAGTGCTCACCTCATT | |
| GCCATCCTCTGTGGCTATGGGCCCATCATCACTGTCTACCTGCAGCCCAGACCCAACCCCA | |
| TGCTGGGAACCGTGGTACAAATTCTCATGAATGTGGTAGGACCAATGCTGAACCCTTTGAT | |
| CTATACCTTGAGGAATAAGGAAGTAAAAACAGCCCTGAAAACAATATTGCACAGGACAGG | |
| CCATGTTCCTGAGAGTTAG | |
| AOLFR324B sequences: | |
| MPIANDTQFHTSSFLLLGIPGLEDVHIWIGFPFFSVYLIALLGNAAIFFVIQTEQSLHEPMYYCLA | (SEQ ID NO: 509) |
| MLDSIDLSLSTATIPKMLGIFWFNIKEISFGGYLSQMFFIHFFTVMESIVLVAMAFDRYIAICKPL | |
| WYTMILTSKIISLIAGIAVLRSLYMVIPLVFLLLRLPFCGHRIIPHTYCEHMGIARLACASIKVNIM | |
| FGLGSISLLLLDVLLIILSHIRILYAVFCLPSWEARLKALNTCGSHIGVILAFSTPAFFSFFTHCFGH | |
| DIPQYIHIFLANLYVVVPPTLNPVIYGVRTKHIRETVLRIFFKTDH | |
| ATGCCTATAGCTAACGACACCCAGTTCCATACTTCTTCATTCCTACTGCTGGGTATCCCAGG | (SEQ ID NO: 510) |
| GCTAGAAGATGTGCACATCTGGATTGGATTCCCTTTTTTCTCTGTGTATCTTATTGCACTCC | |
| TGGGAAATGCTGCTATCTTCTTTGTGATCCAAACTGAGCAGAGTCTCCATGAGCCCATGTA | |
| CTACTGCCTGGCCATGTTGGATTCCATTGACCTGAGCTTGTCTACGGCCACCATTCCCAAA | |
| ATGCTGGGCATCTTCTGGTTCAATATCAAGGAAATATCTTTTGGAGGCTACCTTTCTCAGA | |
| TGTTCTTCATCCATTTCTTCACTGTCATGGAGAGCATCGTATTGGTGGCCATGGCCTTTGAC | |
| CGCTACATTGCCATTTGCAIACCTCTTTGGTACACCATGATCCTCACCAGCAAAATCATCA | |
| GCCTCATTGCAGGCATTGCTGTCCTGAGGAGCTTGTACATGGTCATTCCACTGGTGTTTCT | |
| CCTCTTAAGGTTGCCCTTCTGTGGACATCGTATCATCCCTCATACTTACTGTGAGCACATGG | |
| GCATTGCCCGTCTGGCCTGTGCCAGCATCAAAGTCAACATTATGTTTGGTCTTGGCAGTAT | |
| TTCTCTCTTGTTATTGGATGTGCTCCTTATTATTCTCTCCCATATCAGGATCCTCTATGCTGT | |
| CTTCTGCCTGCCCTCCTGGGAAGCTCGACTCAAAGCTCTCAACACCTGTGGCTCTCACATT | |
| GGTGTTATCTTAGCCTTTTCTACACCAGCATTTTTCTCTTTCTTTACACACTGCTTTGGCCAT | |
| GATATTCCCCAATATATCCACATTTTCTTGGCTAATCTATATGTGGTTGTTCCTCCCACCCT | |
| CAATCCTGTAATCTATGGGGTCAGAACCAAACATATTAGGGAGACAGTGCTGAGGATTTTC | |
| TTCAAGACAGATCACTAA | |
| AOLFR328 sequences: | |
| MALGNHSTITEFLLLGLSADPNIRALLFVLFLGIYLLTIMENLMLLLVIRADSCLHKPMYFFLSH | (SEQ ID NO: 511) |
| LSFVDLCFSSVIVPKMLENLLSQRKTISVEGCLAQVFFVFVTAGTEACLLSGMAYDRHAAIRRP | |
| LLYGQIMGKQLYMHLVWGSWGLGFLDALINVLLAVNMVFCEAKIIHHYSYEMPSLLPLSCSDI | |
| SRSLIVLLCSTLLHGLGNFLLVFLSYTRIISTILSISSTSGRSKAFSTCSAHLTAVTLYYGSGLLRHL | |
| MPNSGSPIELIFSVQYTVVTPMLNSLIYSLKNKEVKVALKRTLEKYLQYTRR | |
| ATGGCCTTGGGGAATCACAGCACCATCACCGAGTTCCTCCTCCTTGGGCTGTGTGCCGACC | (SEQ ID NO: 512) |
| CCAAGATCCGGGCTCTGCTCTTTGTGCTGTTCCTGGGGATTTACCTCCTGACCATAATGGA | |
| AAACCTGATGCTGCTGCTCGTGATCAGGGCTGATTCTTGTCTCCATAAGCCCATGTATTTCT | |
| TCCTGAGTCACCTCTCTTTTGTTGATCTCTGCTTCTCTTCAGTCATTGTGCCCAAGATGCTG | |
| GAGAACCTCCTGTCACAGAGGAAAACCATTTCAGTAGAGGGCTGCCTGGCTCAGGTCTTCT | |
| TTGTGTTTGTCACTGCAGGGACTGAAGCCTGCCTTCTCTCAGGGATGGCCTATGACCGGCA | |
| TGCTGCCATCCGCCGCGCACTACTTTATGGACAGATCATGGGTAAACAGCTGTATATGCAC | |
| CTTGTGTGGGGCTCATGGGGACTGGGCTTTCTGGACGCACTCATCAATGTCCTCCTAGCTG | |
| TAAACATGGTCTTTTGTGAAGCCAAAATCATTCACCACTACAGCTATGAGATGCCATCCCT | |
| CCTCCCTCTGTCCTGCTCTGATATCTCCAGAAGCCTGATCGTTTTGCTCTGCTCCACTCTCC | |
| TACATGGGCTGGGAAACTTCCTTTTGGTCTTCTTATCCTACACCCGTATAATCTCTACGATC | |
| CTAAGCATCAGCTCTACCTCGGGCAGAAGCAAGGCCTTCTCCACCTGCTCTGCCCAGCTCA | |
| CTGCAGTGACACTTTACTATGGCTCAGGTTTGCTCCGCCATCTCATGCCAAACTCAGGTTC | |
| CCCCATAGAGTTGATCTTCTCTGTGCAGTATACTGTAGTCACTCCCATGCTGAATTCCCTCA | |
| TCTATAGCCTGAAAAATAAGGAAGTGAAGGTAGCTCTGAAAAGAACTTTGGAAAAATATT | |
| TGCAATATACCAGACGTTGA | |

The application's sequence listing, which the Patent Office published only in electronic form, follows.

SEQUENCE LISTING (531 sequences)

SEQ ID NO: 1 - protein, 325 aa, Homo sapiens
MKTFSSFLQIGRNMHQGNQTTITEFILLGFFKQDEHQNLLFVLFLGMYLVTVIGNGLIIVAISLDTYLHTPMYLFLANLSFADISSISNSVPKMLVNIQTKSQSISYESCITQMYFSIVFVVIDNLLLGTMAYDHFVAICHPLNYTILMRPRFGILLTVISWFLSNIIALTHTLLLIQLLFCNHNTLPHFFCDLAPLLKLSCSDTLINELVLFIVGLSVIIFPFTLSFFSYVCIIRAVLRVSSTQGKWKAFSTCGSHLTVVLLFYGTIVGVYFFPSSTHPEDTDKIGAVLFTVVTPMINPFIYSLRNKDMKGALRKLINRKISSL

SEQ ID NO: 2 - DNA, 978 bp, Homo sapiens
atgaagacttttagttcctttcttcagatcggcagaaatatgcatcaaggaaaccaaaccaccatcactgaattcattctcctgggatttttcaagcaggatgagcatcaaaacctcctctttgtgcttttcttgggtatgtacctggtcactgtgattgggaacgggctcatcattgtggctatcagcttggatacgtaccttcatacccccatgtatctcttccttgccaatctatcctttgctgatatttcctccatttccaactcagtccccaaaatgctggtgaatattcaaaccaagagtcaatccatctcttatgagagctgcatcacacagatgtacttttctattgtgtttgtcgtcattgacaatttgctcttggggaccatggcctatgaccactttgtggcgatctgccaccctctgaattatacaattctcatgcggcccaggttcggcattttgctcacagtcatctcatggttcctcagtaatattattgctctgacacacacccttctgctcattcaattgctcttctgtaaccacaacactctcccacacttcttctgtgacttggcccctctgctcaaactgtcctgttcagatacattgatcaatgagcttgtgttgtttattgtgggtttatcagttatcatcttcccctttacactcagcttcttttcctatgtctgcatcatcagagctgtcctgagagtatcttccacacagggaaagtggaaagccttctccacttgtggctctcacctgacagttgtattactgttctacggaaccattgtaggcgtgtactttttcccctcctccactcaccctgaggacactgataagattggtgctgtcctattcactgtggtgacacccatgataaaccccttcatctacagcttgaggaataaggatatgaaaggtgccctgagaaagctcatcaatagaaaaatttcttccctttga

SEQ ID NO: 3 - protein, 314 aa, Homo sapiens
MMMVLRNLSMEPTFALLGFTDYPKLQIPLFLVFLLMYVITVVGNLGMIIIIKINPKFHTPMYFFLSHLSFVDFCYSSIVTPKLLENLVMADKSIFYFSCMMQYFLSCTAVVTESFLLAVMAYDRFVAICNPLLYTVAMSQRLCALLVAGSYLWGMFGPLVLLCYALRLNFSGPNVINHFFCEYTALISVSGSDILIPHLLLFSFATFNEMCTLLIILTSYVFIFVTVLKIRSVSGRHKAFSTWASHLTAITIFHGTILFLYCVPNSKNSRQTVKVASVFYTVVNPMLNPPIYSLRNKDVKDAFWKLIHTQVPFH

SEQ ID NO: 4 - DNA, 945 bp, Homo sapiens
atgatgatggttttaaggaatctgagcatggagcccacctttgcccttttaggtttcacagattacccaaagcttcagattcctctcttccttgtgtttctgctcatgtatgttatcacagtggtaggaaaccttgggatgatcataataatcaagattaaccccaaatttcacactcctatgtactttttccttagtcacctctcttttgttgatttttgttactcttccattgtcactcccaagctgcttgagaacttggtaatggcagataaaagcatcttctactttagctgcatgatgcagtacttcctgtcctgcactgctgtggtgacagagtctttcttgctggcagtgatggcctatgaccgctttgtggccatctgcaatcctctgctttatacagtggccatgtcacagaggctctgtgccctgctggtggctgggtcatatctctggggcatgtttggccccttggtactcctttgttatgctctccggttaaacttctctggacctaatgtaatcaaccacttcttttgtgagtatactgctctcatctctgtgtctggctctgatatactcatcccccacctgctgcttttcagcttcgccaccttcaatgagatgtgtacactactgatcatcctcacttcctatgttttcatttttgtgactgtactaaaaatccgttctgttagtgggcgccacaaagccttctccacctgggcctcccacctgactgctatcaccatcttccatgggaccatccttttcctttactgtgtacccaactccaaaaactctcggcaaacagtcaaagtggcctctgtattttacacagttgtcaaccccatgctgaaccctccgatctacagcctaaggaataaagacgtgaaggatgctttctggaagttaatacatacacaagttccatttcactga

SEQ ID NO: 5 - protein, 313 aa, Homo sapiens
MLLTDRNTSGTTFTLLGFSDYPELQVPLFLVFLAIYNVTVLGNIGLIVIIKINPKLHTPMYFFLSQLSFVDFCYSSIIAPKMLVNLVVKDRTISFLGCVVQFFFFCTFVVTESFLLAVMAYDRFVAICNPLLYTVDMSQKLCVLLVVGSYAWGVSCSLELTCSALKLCFHGFNTINHFFCEFSSLLSLSCSDTYINQWLLFFLATFNEISTLLIVLTSYAFIVVTILKMRSVSGRRKAFSTCASHLTAITIFHGTILFLYCVPNSKNSRHTVKVASVFYTVVIPMLNPLIYSLRNKDVKDTVTEILDTKVFSY

SEQ ID NO: 6 - DNA, 942 bp, Homo sapiens
atgctgctgacagatagaaatacaagtgggaccacgttcaccctcttgggcttctcagattacccagaactgcaagtcccactcttcctggtttttctggccatctacaatgtcactgtgctagggaatattgggttgattgtgatcatcaaaatcaaccccaaactgcatacccccatgtactttttcctcagccaactctcctttgtggatttctgctattcctccatcattgctcccaagatgttggtgaaccttgttgtcaaagacagaaccatttcatttttaggatgcgtagtacaattctttttcttctgtacctttgtggtcactgaatcctttttattagctgtgatggcctatgaccgcttcgtggccatttgcaaccctctgctctacacagttgacatgtcccagaaactctgcgtgctgctggttgtgggatcctatgcctggggagtctcatgttccttggaactgacgtgctctgctttaaagttatgttttcatggtttcaacacaatcaatcacttcttctgtgagttctcctcactactctccctttcttgctctgatacttacatcaaccagtggctgctattctttcttgccacctttaatgaaatcagcacactactcatcgttctcacatcttatgcgttcattgttgtaaccatcctcaagatgcgttcagtcagtgggcgccgcaaagccttctccacctgtgcctcccacctgactgccatcaccatcttccatggcaccatcctcttcctttactgtgtgcccaactccaaaaactccaggcacacagtcaaagtggcctctgtgttttacaccgtggtgatccccatgttgaatcccctgatctacagtctgagaaataaagatgtcaaggatacagtcaccgagatactggacaccaaagtcttctcttactga

SEQ ID NO: 7 - protein, 309 aa, Homo sapiens
MENQNNVTEFILLGLTENLELWKIFSAVFLVMYVATVLENLLIVVTIITSQSLRSPMYFFLTFLSLLDVMFSSVVAPKVIVDTLSKSTTISLKGCLTQLFVEHFFGGVGIILLTVMAYDRYVAICKPLHYTIIMSPRVCCLMVGGAWVGGFMHAMIQLLFMYQIPFCGPNIIDHFICDLFQLLTLACTDTHILGLLVTLNSGMMCVAIFLILIASYTVILCSLKSYSSKGRHKALSTCSSHLTVVVLFFVPCIFLYMRPVVTHPIDKAMAVSDSIITPMLNPLIYTLRNAEVKSAMKKLWMKWEALAGK

SEQ ID NO: 8 - DNA, 930 bp, Homo sapiens
atggaaaatcaaaacaatgtgactgaattcattcttctgggtctcacagagaacctggagctgtggaaaatattttctgctgtgtttcttgtcatgtatgtagccacagtgctggaaaatctacttattgtggtaactattatcacaagtcagagtctgaggtcacctatgtatttttttcttaccttcttgtcccttttggatgtcatgttctcatctgtcgttgcccccaaggtgattgtagacaccctctccaagagcactaccatctctctcaaaggctgcctcacccagctgtttgtggagcatttctttggtggtgtggggatcatcctcctcactgtgatggcctatgaccgctacgtggccatctgtaagcccctgcactacacgatcatcatgagtccacgggtgtgctgcctaatggtaggaggggcttgggtggggggatttatgcacgcaatgatacaacttctcttcatgtatcaaatacccttctgtggtcctaatatcatagatcactttatatgtgatttgtttcagttgttgacacttgcctgcacggacacccacatcctgggcctcttagttaccctcaacagtgggatgatgtgtgtggccatctttcttatcttaattgcgtcctacacggtcatcctatgctccctgaagtcttacagctctaaagggcggcacaaagccctctctacctgcagctcccacctcacggtggttgtattgttctttgtcccctgtattttcttgtacatgaggcctgtggtcactcaccccatagacaaggcaatggctgtgtcagactcaatcatcacacccatgttaaatcccttgatctatacactgaggaatgcagaggtgaaaagtgccatgaagaaactctggatgaaatgggaggctttggctgggaaataa

SEQ ID NO: 9 - protein, 311 aa, Homo sapiens
MGKENCTTVAEFILLGLSDVPELRVCLFLLFLLIYGVTLLANLGMIALIQVSSRLHTPMYFFLSHLSSVDFCYSSIIVPKMLANIFNKDKAISFLGCMVQFYLFCTCVVTEVFLLAVMAYDRFVAICNPLLYTVTMSWKVRVELASCCYFCGTVCSLIHLCLALRIPFYRSNVINHFFCDLPPVLSLACSDITVNETLLFLVATLNESVTIMIILTSYLLILTTILKMGSAEGRHKAFSTCASHLTAITVFHGTVLSIYCRPSSGNSGDADKVATVFYTVVIPMLNSVIYSLRNKDVKEALRKVMGSKIHS

SEQ ID NO: 10 - DNA, 936 bp, Homo sapiens
atgggcaaggaaaactgcaccactgtggctgagttcattctccttggactatcagatgtccctgagttgagagtctgcctcttcctgctgttccttctcatctatggagtcacgttgttagccaacctgggcatgattgcactgattcaggtcagctctcggctccacacccccatgtactttttcctcagccacttgtcctctgtagatttctgctactcctcaataattgtgccaaaaatgttggctaatatctttaacaaggacaaagccatctccttcctagggtgcatggtgcaattctacttgttttgcacttgtgtggtcactgaggtcttcctgctggccgtgatggcctatgaccgctttgtggccatctgtaaccctttgctatacacagtcaccatgtcttggaaggtgcgtgtggagctggcttcttgctgctacttctgtgggacggtgtgttctctgattcatttgtgcttagctcttaggatccccttctatagatctaatgtgattaaccactttttctgtgatctacctcctgtcttaagtcttgcttgctctgatatcactgtgaatgagacactgctgttcctggtggccactttgaatgagagtgttaccatcatgatcatcctcacctcctacctgctaattctcaccaccatcctgaagatgggctctgcagagggcaggcacaaagccttctccacctgtgcttcccacctcacagctatcactgtcttccatggaacagtcctttccatttattgcaggcccagttcaggcaatagtggagatgctgacaaagtggccaccgtgttctacacagtcgtgattcctatgctgaactctgtgatctacagcctgagaaataaagatgtgaaagaagctctcagaaaagtgatgggctccaaaattcactcctag

SEQ ID NO: 11 - protein, 314 aa, Homo sapiens [sequence omitted]

SEQ ID NO: 12 - DNA, 945 bp, Homo sapiens
atgatggcatctgaaagaaatcaaagcagcacacccacttttattctcttgggtttttcagaatacccagaaatccaggttccactctttctggttttcttgttcgtctacacagtcactgtagtggggaacttgggcatgataataatcatcagactcaattcaaaactccatacaatcatgtactttttccttagtcacttgtccttgacagacttctgtttttccactgtagttacacctaaactgttggagaacttggttgtggaatacagaaccatctctttctctggttgcatcatgcaattttgttttgcttgcatttttggagtgacagaaactttcatgttagcagcgatggcttatgaccgttttgtggcagtttgtaaacccttgctgtataccactattatgtctcagaagctctgtgctcttctggtggctgggtcctatacatgggggatagtgtgctccctgatactcacatattttcttcttgacttatcgttttgtgaatctaccttcataaataattttatctgtgaccactctgtaattgtttctgcctcctactcagacccctatatcagccagaggctatgctttattattgccatattcaatgaggtgagcagcctaattatcattctgacatcatatatgcttattttcactaccattatgaagatgcgatctgcaagtgggcgccagaaaactttctccacctgtgcctcccacctgacagccatcactatcttccatggaactatccttttcctttactgtgttcctaatcctaaaacttctagcctcatagttacagtggcttctgtgttttacacagtggcgattccaatgctgaacccattgatctacagccttaggaacaaagatatcaataacatgtttgaaaaattagttgtcaccaaattgatttaccactga

SEQ ID NO: 13 - protein, 347 aa, Homo sapiens
MSYFYRLKLMKEAVLVKLPFTSLPLLLQTLSRKSRDMEIKNYSSSTSGFILLGLSSNPQLQKPLFAIFLIMYLLAAVGNVLIIPAIYSDPRLHTPMYFFLSNLSFMDICFTTVIVPKMLVNFLSETKVISYVGCLAQMYFFMAFGNTDSYLLASMAIDRLVAICNPLHYDVVMKPRHCLLMLLGSCSISHLHSLFRVLLMSRLSFCASHIIKHFFCDTQPVLKLSCSDTSSSQMVVMTETLAVIVTPFLCIIFSYLRIMVTVLRIPSAAGKWKAFSTCGSHLTAVALFYGSIIYVYFRPLSMYSVVRDRVATVMYTVVTPMLNPFIYSLRNKDMKRGLKKLQDRIYR

SEQ ID NO: 14 - DNA, 1044 bp, Homo sapiens
atgagctatttttacaggcttaagcttatgaaagaagctgtcttggtcaaactgccctttacatctctcccactgcttctccaaaccctatccaggaagtccagagacatggagataaagaactacagcagcagcacctcaggcttcatcctcctgggcctctcttccaaccctcagctgcagaaacctctctttgccatcttcctcatcatgtacctgctcgctgcggtggggaatgtgctcatcatcccggccatctactctgaccccaggctccacacccctatgtacttttttctcagcaacttgtctttcatggatatctgcttcacaacagtcatagtgcctaagatgctggtgaattttctatcagagacaaaggttatctcctatgtgggctgcctggcccagatgtacttctttatggcatttgggaacactgacagctacctgctggcctctatggccatcgaccggctggtggccatctgcaaccccttacactatgatgtggttatgaaaccacggcattgcctgctcatgctattgggttcttgcagcatctcccacctacattccctgttccgcgtgctacttatgtctcgcttgtctttctgtgcctctcacatcattaagcactttttctgtgacacccagcctgtgctaaagctctcctgctctgacacatcctccagccagatggtggtgatgactgagaccttagctgtcattgtgacccccttcctgtgtatcatcttctcctacctgcgaatcatggtcactgtgctcagaatcccctctgcagccgggaagtggaaggccttctctacctgtggctcccacctcactgcagtagcccttttctatgggagtattatttatgtctattttaggcccctgtccatgtactcagtggttagggaccgggtagccacagttatgtacacagtagtgacacccatgctgaaccctttcatctacagcctgaggaacaaagatatgaagaggggtttgaagaaattacaggacagaatttaccggtaa

SEQ ID NO: 15 - protein, 311 aa, Homo sapiens
MATSNHSSGAEFILAGLTQRPELQLPLFLLFLGIYVVTVVGNLGMIFLIALSSQLYPPVYYFLSHLSFIDLCYSSVITPKMLVNFVPEENIISFLECITQLYFFLIFVIAEGYLLTAMEYDRYVAICRPLLYNIVMSHRVCSIMMAVVYSLGFLWATVHTTRMSVLSFCRSHTVSHYFCDILPLLTLSCSSTHINEILLFIIGGVNTLATTLAVLISYAFIFSSILGIHSTEGQSKAFGTCSSHLLAVGIFFGSITFMYFKPPSSTTMEKEKVSSVFYITIIPMLNPLIYSLRNKDVKNALKKMTRGRQSS

SEQ ID NO: 16 - DNA, 936 bp, Homo sapiens
atggctacttcaaaccattcttcaggggctgagtttatcctggcaggcttgacacaacgcccagaacttcaactgccactcttcctcctgttccttggaatatatgtggtcacagtggtggggaacctgggcatgatcttcttaattgctctcagttctcaactttaccctccagtgtattattttctcagtcatttgtctttcattgatctctgctactcctctgtcattacccctaagatgctggtgaactttgttccagaggagaacattatctcctttctggaatgcattactcaactttatttcttccttatttttgtaattgcagaaggctaccttctgacagccatggaatatgaccgttatgttgctatctgtcgcccactgctttacaatattgtcatgtcccacagggtctgttccataatgatggctgtggtatactcactgggttttctgtgggccacagtccatactacccgcatgtcagtgttgtcattctgtaggtctcatacggtcagtcattatttttgtgatattctccccttattgactctgtcttgctccagcacccacatcaatgagattctgctgttcattattggaggagttaataccttagcaactacactggcggtccttatctcttatgctttcattttctctagtatccttggtattcattccactgaggggcaatccaaagcctttggcacttgtagctcccatctcttggctgtgggcatcttttttgggtctataacattcatgtatttcaagcccccttccagcactactatggaaaaagagaaggtgtcttctgtgttctacatcacaataatccccatgctgaatcctctaatctatagcctgaggaacaaggatgtgaaaaatgcactgaagaagatgactaggggaaggcagtcatcctga

SEQ ID NO: 17 - protein, 313 aa, Homo sapiens [sequence omitted]

SEQ ID NO: 18 - DNA, 942 bp, Homo sapiens
atgctggctagaaacaactccttagtgactgaatttattcttgctggattaacagatcgtccagagttctggcaacccttctttttcctgttcctagtgatctacattgtcaccatggtaggcaaccttggcttgatcactcttttcggtctaaattctcacctccacacaccaatgtactatttcctcttcaatctctccttcattgatctctgttactcctctgttttcactcccaaaatgctaatgaactttgtgtcaaaaaagaatattatctccaatgttgggtgcatgactcggctgtttttctttctctttttcgtcatctctgaatgttacatgttgacctcaatggcatatgatcgctatgtggccatctgtaatccattgctgtataaggtcaccatgtcccatcaggtctgttctatgctcacttttgctgcttacataatgggattggctggagccacggcccacaccgggtgcatgtttagactcaccttctgcagtgctaatatcattaaccattacttgtgtgacatactccccctcctccagctttcctgcaccagcacctatgtcaacgaggtggttgttctcattgttgtgggtactaatatcacggtacccagttgtaccatcctcatttcttatgttttcattgtcactagcattcttcatatcaaatccactcaaggaagatcaaaagccttcagtacttgtagctctcatgtcattgctctgtctctgttttttgggtcagcggcattcatgtatattaaatattcttctggatctatggagcagggaaaagttttttctgttttctacactaatgtggtgcccatgctcaatcccctcatctacagtttgaggaacaaggatgtcaaagttgcactgaggaaagctctgattaaaattcagaggagaaatatattctaa

SEQ ID NO: 19 - protein, 313 aa, Homo sapiens [sequence omitted]

SEQ ID NO: 20 - DNA, 942 bp, Homo sapiens
atgctggctagaaacaactccttagtgactgaatttattcttgctggattaacagatcgtccagagttccggcaacccctctttttcctgtttctagtgatctacattgtcaccatggtaggcaaccttggcttgatcattcttttcggtctaaattctcacctccacacaccaatgtactatttcctcttcaatctctccttcattgatctctgttactcctctgttttcactcccaaaatgctaatgaactttgtatcaaaaaagaatattatctcctatgttgggtgcatgactcagctgtttttctttctcttttttgtcatctctgaatgctacatattgacctcaatggcatatgatcgctatgtggccatctgtaatccattgctgtataaggtcaccatgtcccatcaggtctgttctatgctcacttttgctgcttacataatgggattggctggagccacggcccacaccgggtgcatgcttagactcaccttctgcagtgctaatatcatcaaccattacttgtgtgacatactccccctcctccagctttcctgcaccagcacctatgtcaacgaggtggttgttctcattgttgtgggtattaatatcatggtacccagttgtaccatcctcatttcttatgttttcattgtcactagcattcttcatatcaaatccactcaaggaagatcaaaagccttcagtacttgtagctctcatgtcattgctctgtctctgttttttgggtcagcggcattcatgtatattaaatattcttctggatctatggagcagggaaaagtttcttctgttttctacactaatgtggtgcccatgctcaatcctctcatctacagtttgaggaacaaggatgtcaaagttgcactgaggaaagctctgattaaaattcagagaagaaatatattctaa

SEQ ID NO: 21 - protein, 309 aa, Homo sapiens
MTLRNSSSVTEFILVGLSEQPELQLPLFLLFLGIYVFTVVGNLGLITLIGINPSLHTPMYFFLFNLSFIDLCYSCVFTPKMLNDFVSESIISYVGCMTQLFFFCFFVNSECYVLVSMAYDRYVAICNPLLYMVTMSPRVCFLLMFGSYVVGFAGAMAHTGSMLRLTFCDSNVIDHYLCDVLPLLQLSCTSTHVSELVFFIVVGVITMLSSISIVISYALILSNILCIPSAEGRSKAFSTWGSHIIAVALFFGSGTFTYLTTSFPGSMNHGRFASVFYTNVVPMLNPSIYSLRNKDDKLALGKTLKRVLF

SEQ ID NO: 22 - DNA, 930 bp, Homo sapiens
atgactctgagaaacagctcctcagtgactgagtttatccttgtgggattatcagaacagccagagctccagctccctcttttccttctattcttagggatctatgtgttcactgtggtgggcaacttgggcttgatcaccttaattgggataaatcctagccttcacacccccatgtactttttcctcttcaacttgtcctttatagatctctgttattcctgtgtgtttacccccaaaatgctgaatgactttgtttcagaaagtatcatctcttatgtgggatgtatgactcagctatttttcttctgtttctttgtcaattctgagtgctatgtgttggtatcaatggcctatgatcgctatgtggccatctgcaaccccctgctctacatggtcaccatgtccccaagggtctgctttctgctgatgtttggttcctatgtggtagggtttgctggggccatggcccacactggaagcatgctgcgactgaccttctgtgattccaacgtcattgaccattatctgtgtgacgttctccccctcttgcagctctcctgcaccagcacccatgtcagtgagctggtatttttcattgttgttggagtaatcaccatgctatccagcataagcatcgtcatctcttacgctttgatactctccaacatcctctgtattccttctgcagagggcagatccaaagcctttagcacatggggctcccacataattgctgttgctctgttttttgggtcagggacattcacctacttaacaacatcttttcctggctctatgaaccatggcagatttgcctcagtcttttacaccaatgtggttcccatgcttaacccttcgatctacagtttgaggaataaggatgataaacttgccctgggcaaaaccctgaagagagtgctcttctaa

SEQ ID NO: 23 - protein, 360 aa, Homo sapiens
MERNHNPDNCNVLNFFFADKKNKRRNFGQIVSDVGRICYSVSLSLGEPTTMGRNNLTRPSEFILLGLSSRPEDQKPLFAVFLPIYLITVIGNLLIILAIRSDTRLQTPMYFFLSILSFVDICYVTVIIPKMLVNFLSETKTISYGECLTQMYFFLAFGNTDSYLLAAMAIDRYVAICNPFHYITIMSHRCCVLLLVLSFCIPHFHSLLHILLTNQLIFCASNVIHHFFCDDQPVLKLSCSSHFVKEITVMTEGLAVIMTPFSCIIISYLRILITVLKIPSAAGKRKAFSTCGSHLTVVTLFYGSISYVYFQPLSNYTVKDQIATIIYTVLTPMLNPFIYSLRNKDMKQGLAKLMHRMKCQ

SEQ ID NO: 24 - DNA, 1083 bp, Homo sapiens
atggaaagaaaccacaatccagataattgtaatgttttaaattttttctttgctgataagaagaataaaaggagaaattttggacagattgtatcagatgttggaagaatctgttacagtgttagtttatctttaggtgaacccacaactatgggaagaaataacctaacaagaccctctgaattcatcctccttggactctcctctcgacctgaggatcagaagccgctctttgctgtgttcctccccatctaccttatcacagtgataggaaacctgcttatcatcctggccatccgctcagacactcgtctccagacgcccatgtacttctttctaagcatcctgtcttttgttgacatttgctatgtgacagtcattatccctaagatgctggtgaacttcttatcagagacaaagaccatctcttacggtgagtgtctgacccagatgtactttttcttagcctttggaaacacagacagttacctgctagcagccatggccattgaccgctatgtggccatatgtaatcccttccactacatcaccattatgagtcacagatgctgtgtcctgcttctggttctctccttctgcattccacattttcactccctcctgcacattcttctgactaatcagctcatcttctgtgcctccaatgtcatccatcactttttctgcgatgatcaaccagtgctaaaattgtcctgttcctcccattttgtcaaagaaatcacagtaatgacagaaggcttggctgtcataatgaccccgttttcatgcatcatcatctcttatttaagaatcctcatcactgttctgaagattccttcagctgctggaaagcgtaaagcattttctacctgtggctctcatctcacagtggtgaccctgttttatggaagcattagctatgtctattttcagcccctgtccaactatactgtcaaggatcaaatagcaacaattatctacaccgtactgactcctatgctaaatccatttatctatagtctgaggaacaaagacatgaagcagggtttggcaaagttgatgcacaggatgaaatgtcagtaa

SEQ ID NO: 25 - protein, 312 aa, Homo sapiens
  MOD_RES (273): Any amino acid
MDQKNGSSFTGFILLGFSDRPQLELVLFVVLLIFYIFTLLGNKTIIVLSHLDPHLHNPMYFFFSNLSFLDLCYTTGIVPQLLVNLRGADKSISYGGCVVQLYISLGLGSTECVLLGVMAFDRYAAVCRPLHYTVVMHPCLYVLMASTSWVIGFANSLLQTVLILLLTLCGRNKLEHFLCEVPPLLKLACVDTTMNESELFFVSVIILLVPVALIIFSYSQIVRAVVRIKSATGQRKVFGTCGSHLTVVSLFYGTAIYAYLQPGNNYSQDQGKXISLFYTIITPMINPLIYTLRNKDVKGALKKVLWKNYDSR

SEQ ID NO: 26 - DNA, 939 bp, Homo sapiens
atggatcagaaaaatggaagttctttcactggatttatcctactgggtttctctgacaggcctcagctggagctagtcctctttgtggttcttttgatcttctatatcttcactttgctggggaacaaaaccatcattgtattatctcacttggacccacatcttcacaatcctatgtattttttcttctccaacctaagctttttggatctgtgttacacaaccggcattgttccacagctcctggttaatctcaggggagcagacaaatcaatctcctatggtggttgtgtagttcagctgtacatctctctaggcttgggatctacagaatgcgttctcttaggagtgatggcatttgaccgctatgcagctgtttgcaggcccctccactacacagtagtcatgcacccttgtctgtatgtgctgatggcttctacttcatgggtcattggttttgccaactccctattgcagacggtgctcatcttgcttttaacactttgtggaagaaataaattagaacactttctttgtgaggttcctccattgctcaagcttgcctgtgttgacactactatgaatgaatctgaactcttctttgtcagtgtcattattcttcttgtacctgttgcattaatcatattctcctatagtcagattgtcagggcagtcgtgaggataaagtcagcaacagggcagagaaaagtgtttgggacatgtggctcccacctcacagtggtttccctgttctacggcacagctatctatgcttacctccagcccggcaacaactactctcaggatcagggcaagktcatctctctcttctacaccatcattacacccatgatcaaccccctcatatatacactgaggaacaaggatgtgaaaggagcacttaagaaggtgctctggaagaactacgactccagatga

SEQ ID NO: 27 - protein, 341 aa, Homo sapiens
MALPLLLSPSCFASSQSLSSRMNSENLTRAAVAPAEFVLLGITNRWDLRVALFLTCLPVYLVSLLGNMGMALLIRMDARLHTPMYFFLANLSLLDACYSSAIGPKMLVDLLLPRATIPYTACALQMFVFAGLADTECCLLAAMAYDRYVAIRNPLLYTTAMSQRLCLALLGASGLGGAVSAFVHTTLTFRLSFCRSRKINSFFCDIPPLLAISCSDTSLNELLLFAICGFIQTATVLAITVSYGFIAGAVIHMRSVEGSRRAASTGGSHLTAVAMMYGTLIFMYLRPSSSYALDTDKMASVFYTLVIPSLNPLIYSLRNKEVKEALRQTWSRFHCPGQGSQ

SEQ ID NO: 28 - DNA, 1026 bp, Homo sapiens
atggccttgccattgctcttatctccctcctgctttgcctcttctcagtctctgtccagtaggatgaactcagagaacctcacccgggccgcggttgcccctgctgaattcgtcctcctgggcatcacaaatcgctgggacctgcgtgtggccctcttcctgacctgcctgcctgtctacctggtgagcctgctgggaaacatgggcatggcgctgctgatccgcatggatgcccggctccacacacctatgtacttcttcctggccaacctctccctgctggatgcctgctattcctccgccatcggccccaagatgctagtggacctgctgctgccccgagccaccatcccttacacagcctgtgccctccagatgtttgtctttgcaggtctggctgatactgagtgttgcttgctggcagccatggcctatgaccgctacgtggccatcagaaacccacttctctatacaacagctatgtcgcagcgtctatgcctggccttgctgggagcatcaggcctgggtggggcagtgagtgcctttgttcacacaaccctcaccttccgcctgagcttctgccgctcccggaagatcaatagcttcttctgcgatatccctccactgctggccatctcgtgcagtgacaccagtctcaatgaactccttctcttcgccatctgtggcttcatccagacagccacggtgttagctatcacggtgtcttatggcttcatcgctggggctgtgatccacatgcgctcggtcgagggcagtcggcgagcagcctccaccggtggttcccacctcacagccgtggccatgatgtacgggacactcattttcatgtacctgcgccccagctccagctatgccctggacactgacaagatggcctctgtgttctataccctggtcatcccgtctctcaacccactcatctacagcctccgcaataaggaggtcaaggaggccctcaggcagacctggagccgattccactgtccagggcaggggtcccagtga

SEQ ID NO: 29 - protein, 309 aa, Homo sapiens
MRENNQSSTLEFILLGVTGQQEQEDFFYILFLFIYPITLIGNLLIVLAICSDVRLHNPMYFLLANLSLVDIFFSSVTIPKMLANHLLGSKSISFGGCLTQMYFMIALGNTDSYILAAMAYDRAVAISHPLHYTTIMSPRSCIWLIAGSWVIGNANALPHTLLTASLSFCGNQEVANFYCDITPLLKLSCSDIHFHVKMMYLGVGIFSVPLLCIIVSYIRVFSTVFQVPSTKGVLKAFSTCGSHLTVVSLYYGTVMGTYFRPLTNYSLKDAVITVMYTAVTPMLNPFIYSLRNRDMKAALRKLFNKRISS

SEQ ID NO: 30 - DNA, 930 bp, Homo sapiens
atgagggaaaataaccagtcctctacactggaattcatcctcctgggagttactggtcagcaggaacaggaagatttcttctacatcctcttcctgttcatttaccccatcacattgattggaaacctgctcattgtcctagccatttgctctgatgttcgccttcacaaccccatgtattttctccttgccaacctctccttggttgacatcttcttctcatcggtaaccatccctaagatgctggccaaccatctcttgggcagcaaatccatctcttttgggggatgcctaacgcagatgtatttcatgatagccttgggtaacacagacagctatattttggctgcaatggcatatgatcgagctgtggccatcagccacccacttcactacacaacaattatgagtccacggtcttgtatctggcttattgctgggtcttgggtgattggaaatgccaatgccctcccccacactctgctcacagctagtctgtccttctgtggcaaccaggaagtggccaacttctactgtgacattacccccttgctgaagttatcctgttctgacatccactttcatgtgaagatgatgtacctaggggttggcattttctctgtgccattactatgcatcattgtctcctatattcgagtcttctccacagtcttccaggttccttccaccaagggcgtgctcaaggccttctccacctgtggttcccacctcacggttgtctctttgtattatggtacagtcatgggcacgtatttccgccctttgaccaattatagcctaaaagacgcagtgatcactgtaatgtacacggcagtgaccccaatgttaaatcctttcatctacagtctgagaaatcgggacatgaaggctgccctgcggaaactcttcaacaagagaatctcctcgtaa

SEQ ID NO: 31 - protein, 311 aa, Homo sapiens
MRRNCTLVTEFILLGLTSRRELQILLFTLFLAIYMVTVAGNLGMIVLIQANAWLHMPMYFFLSHLSFVDLCFSSNVTPKMLEIFLSEKKSISYPACLVQCYLFIALVHVEIYILAVMAFDRYMAICNPLLYGSRMSKSVCSFLITVPYVYGALTGLMETMWTYNLAFCGPNEINHFYCADPPLIKLACSDTYNKELSMFIVAGWNLSFSLFIICISYLYIFPAILKIRSTEGRQKAFSTCGSHLTAVTIFYATLFFMYLRPPSKESVEQGKMVAVFYTTVIPMLNLIIYSLRNKNVKEALIKELSMKIYFS

SEQ ID NO: 32 - DNA, 936 bp, Homo sapiens
atgagaagaaactgcacgttggtgactgagttcattctcctgggactgaccagtcgccgggaattacaaattctcctcttcacgctgtttctggccatttacatggtcacggtggcagggaaccttggcatgattgtcctcatccaggccaacgcctggctccacatgcccatgtactttttcctgagccacttatccttcgtggatctgtgcttctcttccaatgtgactccaaagatgctggagattttcctttcagagaagaaaagcatttcctatcctgcctgtcttgtgcagtgttacctttttatcgccttggtccatgttgagatctacatcctggctgtgatggcctttgaccggtacatggccatctgcaaccctctgctttatggcagcagaatgtccaagagtgtgtgctccttcctcatcacggtgccttatgtgtatggagcgctcactggcctgatggagaccatgtggacctacaacctagccttctgtggccccaatgaaattaatcacttctactgtgcggacccaccactgattaagctggcttgttctgacacctacaacaaggagttgtcaatgtttattgtggctggctggaacctttctttttctctcttcatcatatgtatttcctacctttacattttccctgctattttaaagattcgctctacagagggcaggcaaaaagctttttctacctgtggctcccatctgacagctgtcactatattctatgcaacccttttcttcatgtatctcagacccccctcaaaggaatctgttgaacagggtaaaatggtagctgtattttataccacagtaatccctatgctgaaccttataatttatagccttagaaataaaaatgtaaaagaagcattaatcaaagagctgtcaatgaagatatacttttcttaa

SEQ ID NO: 33 - protein, 307 aa, Homo sapiens
MLNFTDVTEFILLGLTSRREWQVLFFIIFLVVYIITMVGNIGMMVLIKVSPQLNNPMYFFLSHLSFVDVWFSSNVTPKMLENLFSDKKTITYAGCLVQCFFFIALVHVEIFILAAMAFDRYMAIGNPLLYGSKMSRVVCIRLITFPYIYGFLTSLAATLWTYGLYFCGKIEINHFYCADPPLIKMACAGTFVKEYTMIILAGINFTYSLTVIIISYLFILIAILRMRSAEGRQKAFSTCGSHLTAVIIFYGTLIFMYLRRPTEESVEQGKMVAVFYTTVIPMLNPMIYSLRNKDVKKAMMKVISRSC

SEQ ID NO: 34 - DNA, 924 bp, Homo sapiens
atgctcaatttcaccgatgtgacagagttcattcttttggggctaacgagccgtcgagaatggcaagttctcttcttcatcatctttcttgtggtctacatcatcaccatggtgggcaatatcggcatgatggtgttaatcaaggtcagtcctcagcttaacaaccccatgtactttttcctcagtcacttgtcatttgttgatgtgtggttttcttccaatgtcacccctaaaatgttggaaaacctgttttcagataaaaaaacaattacttatgctggttgtttagtacagtgtttcttcttcattgctcttgtccatgtggaaatttttattcttgctgcgatggcctttgatagatacatggcaattgggaatcctctgctttatggcagtaaaatgtcaagggttgtctgtattcgactgattactttcccttacatttatggttttctgacgagtctggcagcaacattatggacttacggcttgtacttctgtggaaaaattgagatcaaccatttctactgtgcagatccacctctcatcaaaatggcctgtgccgggacctttgtaaaagaatatacaatgatcatacttgccggcattaacttcacatattccctgactgtaattatcatctcttacttattcatcctcattgccattctgcgaatgcgctcagcagaaggaaggcagaaggccttttccacatgtgggtcccatctgacagctgtcattatattctatggtactctgatcttcatgtatctcagacgtcccacagaggagtctgtggagcaggggaagatggtggctgtgttctataccacagtgatccccatgttgaatcccatgatctacagtctgaggaacaaggatgtgaaaaaggccatgatgaaagtgatcagcagatcatgttaa

SEQ ID NO: 35 - protein, 305 aa, Homo sapiens [sequence omitted]

SEQ ID NO: 36 - DNA, 918 bp, Homo sapiens
atgtccaacacaaatggcagtgcaatcacagaattcattttacttgggctcacagattgcccggaactccagtctctgctttttgtgctgtttctggttgtttacctcgtcaccctgctaggcaacctgggcatgataatgttaatgagactggactctcgccttcacacgcccatgtacttcttcctcactaacttagcctttgtggatttgtgctatacatcaaatgcaaccccgcagatgtcgactaatatcgtatctgagaagaccatttcctttgctggttgctttacacagtgctacattttcattgcccttctactcactgagttttacatgctggcagcaatggcctatgaccgctatgtggccatatatgaccctctgcgctacagtgtgaaaacgtccaggagagtttgcatctgcttggccacatttccctatgtctatggcttctcagatggactcttccaggccatcctgaccttccgcctgaccttctgtagatccaatgtcatcaaccacttctactgtgctgacccgccgctcattaagctttcttgttctgatacttatgtcaaagagcatgccatgttcatatctgctggcttcaacctctccagctccctcaccatcgtcttggtgtcctatgccttcattcttgctgccatcctccggatcaaatcagcagagggaaggcacaaggcattctccacctgtggttcccatatgatggctgtcaccctgttttatgggactctcttttgcatgtatataagaccaccaacagataagactgttgaggaatctaaaataatagctgtcttttacacctttgtgagtccggtacttaatccattgatctacagtctgaggaataaagatgtgaagcaggccttgaagaatgtcctgagatga

SEQ ID NO: 37 - protein, 311 aa, Homo sapiens
METKNYSSSTSGFILLGLSSNPKLQKPLFAIFLIMYLLTAVGNVLIILAIYSDPRLHTPMYFFLSNLSFMDICFTTVIVPKMLVNFLSETKIISYVGCLIQMYFFMAFGNTDSYLLASMAIDRLVAICNPLHYDVVMKPWHCLLMLLGSCSISHLHSLFRVLLMSRLSFCASHIIKHFFCDTQPVLKLSCSDTSSSQMVVMTETLAVIVTPFLCTIFSYLQIIVTVLRIPSAAGKWKAFSTCGSHLTVVVLFYGSVIYVYFRPLSMYSVMKGRVATVMYTVVTPMLNPFIYSLRNKDMKRGLKKLRHRIYS

SEQ ID NO: 38 - DNA, 936 bp, Homo sapiens
atggagacaaagaattatagcagcagcacctcaggcttcatcctcctgggcctctcttccaaccctaagctgcagaaacctctctttgccatcttcctcatcatgtacctactcactgcggtggggaatgtgctcatcatcctggccatctactctgaccccaggctccacacccctatgtacttttttctcagcaacttgtctttcatggatatctgcttcacaacagtcatagtgcctaagatgctggtgaattttctatcagagacaaagattatctcttatgtgggctgcctgatccagatgtacttcttcatggcatttgggaacactgacagctacctgctggcctctatggccatcgaccggctggtggccatctgcaaccccttacactatgatgtggttatgaaaccatggcattgcctactcatgctattgggttcttgcagcatctcccacctacattccctgttccgcgtgctacttatgtctcgcttgtctttctgtgcctctcacatcattaagcactttttctgtgacacccagcctgtgctaaagctctcctgctctgacacatcctccagccagatggtggtgatgactgagaccttagctgtcattgtgacccccttcctgtgtaccatcttctcctacctgcaaatcatcgtcactgtgctcagaatcccctctgcagccgggaagtggaaggccttctctacctgtggctcccacctcactgtagtggtcctgttctatgggagtgtcatctatgtctattttaggcctctgtccatgtactcagtgatgaagggccgggtagccacagttatgtacacagtagtgacacccatgctgaaccctttcatctacagcctgaggaacaaagatatgaaaaggggtttgaagaaattaagacacagaatttactcatag

SEQ ID NO: 39 - protein, 316 aa, Homo sapiens
MVEENHTMKNEFILTGFTDHPELKTLLFVVFFAIYLITVVGNISLVALIFTHCRLHTPMYIFLGNLALVDSCCACAITPKMLENFFSEGKRISLYECAVQFYFLCTVETADCFLLAAVAYDRYVAICNPLQYHIMMSKKLCIQMTTGAFIAGNLHSMIHVGLVFRLVFCGLNHINHFYCDTLPLYRLSCVDPFINELVLFIFSGSVQVFTIGSVLISYLYILLTIFRMKSKEGRAKAFSTCASHFSSVSLFYGSIFFLYIRPNLLEEGGNDIPAAILFTIVVPLLNPFIYSLRNKEVISVLRKILLKIKSQGSVNK

SEQ ID NO: 40 - DNA, 951 bp, Homo sapiens
atggttgaagaaaatcataccatgaaaaatgagtttatcctcacaggatttacagatcaccctgagctgaagactctgctgtttgtggtgttctttgccatctatctgatcaccgtggtggggaatattagtttggtggcactgatatttacacactgtcggcttcacacaccaatgtacatctttctgggaaatctggctcttgtggattcttgctgtgcctgtgctattacccccaaaatgttagagaacttcttttctgagggcaaaaggatttccctctatgaatgtgcagtacagttttattttctttgcactgtggaaactgcagactgctttcttctggcagcagtggcctatgaccgctatgtggccatctgcaacccactgcagtaccacatcatgatgtccaagaaactctgcattcagatgaccacaggcgccttcatagctggaaatctgcattccatgattcatgtagggcttgtatttaggttagttttctgtggattgaatcacatcaaccacttttactgtgatactcttcccttgtatagactctcctgtgttgaccctttcatcaatgaactggttctattcatcttctcaggttcagttcaagtctttaccataggtagtgtcttaatatcttatctctatattcttcttactattttcagaatgaaatccaaggagggaagggccaaagccttttctacttgtgcatcccacttttcatcagtttcattattctatggatctatttttttcctatacattagaccaaatttgcttgaagaaggaggtaatgatataccagctgctattttatttacaatagtagttcccttactaaatcctttcatttatagtctgagaaacaaggaagtaaatagtgtcttaagaaaaattctgctgaaaataaaatctcaaggaagtgtgaacaaatga

SEQ ID NO: 41 - protein, 299 aa, Homo sapiens
MEPRKNVTDFVLLGFTQNPKEQKVLFVMFLLFYILTMVGNLLIVVTVTVSETLGSPMSFFLAGLTFIDIIYSSSISPRLISDLFFGNNSISFQSFMAQLFIEHLFGGSEVFLLLVMAYDRYVAICKPLHYLVIMRQWVCVLLLVVSWVGGFLQSVFQLSIIYGLPFCGPNVIDHFFCDMYPLLKLACTDTHVIGLLVVANGGLSCTIAFLLLLISYGVILHSLKKLSQKGRQKAHSTCSSHITVVVFFFVPCIFMCARPARTFSIDKSVSVFYTVITPMLNPLIYTLRNSEMTSAMKKL

SEQ ID NO: 42 - DNA, 900 bp, Homo sapiens
atggagccaaggaaaaatgtgactgactttgtcctcttgggcttcacacagaatccaaaggagcagaaagtactttttgttatgttcttgctcttctacattttgaccatggtgggcaacctgctcattgtagtgaccgtaactgtcagtgagaccctgggctcaccaatgtccttctttcttgctggcttaacatttatagatatcatttattcttcatccatttcccccagattgatttcagacttgttctttgggaataattccatatccttccaatctttcatggcccagctctttatcgagcacctttttggtgggtcagaggtctttctcctgttggtgatggcctatgaccgctatgtggccatctgtaagcccttgcattatttggttatcatgagacaatgggtgtgtgttttgctgctggtagtgtcctgggttggaggatttctgcaatcagtatttcaacttagcattatttatgggctcccattctgtggccccaatgtcattgatcattttttctgtgacatgtatcccttattgaaactggcctgcactgacacccatgttattggcctcttagtggtggccaatggaggactgtcttgcactattgcgtttctgctcttactcatctcttatggtgtcatcctgcactctctaaagaaacttagtcagaaagggaggcaaaaagcccactcaacctgcagttcccacatcactgtggttgtcttcttctttgttccttgtatttttatgtgtgctagacctgctaggaccttctccattgacaaatcagtgagtgtgttttatacagtcataaccccaatgctgaaccccttaatctacactctgagaaattctgagatgacaagtgctatgaagaagctttag

SEQ ID NO: 43 - protein, 315 aa, Homo sapiens
  MOD_RES (3)..(4): Any amino acid
  MOD_RES (7): Any amino acid
  MOD_RES (22): Any amino acid
  MOD_RES (34)..(35): Any amino acid
  MOD_RES (52): Any amino acid
  MOD_RES (145)..(146): Any amino acid
  MOD_RES (169): Any amino acid
MRXXNNXTEFVLLGFSQDPGVXKALFVMFLLTYXXTVVGNLLIVVDIIASPXLGSPMYFFLACLSFIDAAYSTTISPKLIVGLFCDKKTISFQGCMGQLFIDHFFGGAEVFLLVVMACDRYVAICKPLHYLTIMNRQVCFLLLVXXMIGGFVHSAFQIVVYSLPFCGPXVIVHFSCDMHPLLELACTDTYFIGLTVVVNSGAICMVIFNLLLISYGVILSSLKTYSQEKRGKALSTCSSGSTVVVLFFVPCIFIYVRPVSNFPTDKFMTVFYTIITHMLSPLIYTLRNSEMRNAIEKLLGKKLTIFIIGGVSVLM

SEQ ID NO: 44 - DNA, 948 bp, Homo sapiens
  modified_base (9)..(12): a, t, c, or g
  modified_base (11): a, t, c, or g
  modified_base (64)..(66): a, t, c, or g
  modified_base (100)..(105): a, t, c, or g
  modified_base (132): a, t, c, or g
  modified_base (155)..(156): a, t, c, or g
  modified_base (432)..(433): a, t, c, or g
  modified_base (435)..(436): a, t, c, or g
  modified_base (505): a, t, c, or g
atgagacannnnaacaatatnacagaatttgtcctcctgggcttttctcaggatcctggtgtgnnnaaagcattatttgtcatgtttttactcacatacnnnnnnacagtggtggggaacctgctcattgtngtggatattattgccagcccttnnttgggttccccaatgtatttcttccttgcctgcctgtcatttatagatgctgcatattccactaccatttctcccaagttaattgtaggcttattctgtgataaaaagactatttccttccaaggttgcatgggccagctatttatagaccatttctttggtggggctgaggtcttccttctggtggtgatggcctgtgatcgctatgtggccatctgtaagccactgcactatttgaccatcatgaatcgacaggtttgcttccttctgttggtnntnnccatgattggaggttttgtacattctgcgtttcaaattgttgtgtacagtctccctttctgtggtcccnatgtcattgttcatttcagttgtgacatgcacccattactggaactggcatgcactgacacctactttataggcctcactgttgttgtcaatagtggagcaatctgtatggtcattttcaaccttctgttaatctcctatggagtcatcctaagctcccttaaaacttacagtcaggaaaagaggggtaaagccttgtctacctgcagctccggcagtaccgttgttgtcctcttttttgtaccctgtattttcatatatgttagacctgtttcaaactttcctactgataagttcatgactgtgttttataccattatcacacacatgctgagtcctttaatatatacgttgagaaattcagagatgagaaatgctatagaaaaactcttgggtaaaaagttaactatatttattataggaggagtgtccgtcctcatgtag

SEQ ID NO: 45 - protein, 314 aa, Homo sapiens
MAKNNLTRVTEFILMGFMDHPKLEIPLFLVFLSFYLVTLLGNVGMIMLIQVDVKLYTPMYFFLSHLSLLDACYTSVITPQILATLATGKTVISYGHCAAQFFLFTICAGTECFLLAVMAYDRYAAIRNPLLYTVAMNPRLCWSLVVGAYVCGVSGAILRTTCTFTLSFCKDNQINFFFCDLPPLLKLACSDTANIEIVIIFFGNFVILANASVILISYLLIIKTILKVKSSGGRAKTFSTCASHITAVALFFGALIFMYLQSGSGKSLEEDKVVSVFYTVVIPMLNPLIYSLRNKDVKDAFRKVARRLQVSLSM

SEQ ID NO: 46 - DNA, 945 bp, Homo sapiens
atggccaagaataatctcaccagagtaaccgaattcattctcatgggctttatggaccaccccaaattggagattcccctctttctggtgtttctgagtttctacctagtcacccttcttgggaatgtggggatgattatgttaatccaagtagatgtcaaactctacaccccaatgtacttcttcctgagccacctctccctgctggatgcctgttacacctcagtcatcacccctcagatcctagccacattggccacaggcaaaacggtcatctcctacggccactgtgctgcccagttctttttattcaccatctgtgcaggcacagagtgctttctgctggcagtgatggcctatgatcgctatgctgccattcgcaacccactgctctataccgtggccatgaatcccaggctctgctggagcctggtggtaggagcctatgtctgtggggtgtcaggagccatcctgcgtaccacttgcaccttcaccctctccttctgtaaggacaatcaaataaacttcttcttctgtgacctcccacccctgctgaagcttgcctgcagtgacacagcaaacatcgagattgtcatcatcttctttggcaattttgtgattttggccaatgcctccgtcatcctgatttcctatctgctcatcatcaagaccattttgaaagtgaagtcttcaggtggcagggccaagactttctccacatgtgcctctcacatcactgctgtggcccttttctttggagcccttatcttcatgtatctgcaaagtggctcaggcaaatctctggaggaagacaaagtcgtgtctgtcttctatacagtggtcatccccatgctgaaccctctgatctacagcttaagaaacaaagatgtaaaagacgccttcagaaaggtcgctaggagactccaggtgtccctgagcatgtag

SEQ ID NO: 47 - protein, 307 aa, Homo sapiens
METGNLTWVSDFVFLGLSQTRELQRFLFLMFLFVYITTVMGNILIIITVTSDSQLHTPMYFLLRNLAVLDLCFSSVTAPKMLVDLLSEKKTISYQGCMGQIFFFHFLGGAMVFFLSVMAFDRLIAISRPLRYVTVMNTQLWVGLVVATWVGGFVHSIVQLALMLPLPFCGPNILDNFYCDVPQVLRLACTDTSLLEFLKISNSGLLDVVWFFLLLMSYLFILVMLRSHPGEARRKAASTCTTHIIVVSMIFVPSIYLYARPFTPFPMDKLVSIGHTVMTPMLNPMIYTLRNQDMQAAVRRLGRHRLV

SEQ ID NO: 48 - DNA, 924 bp, Homo sapiens
atggaaacagggaacctcacgtgggtatcagactttgtcttcctggggctctcgcagactcgggagctccagcgtttcctgtttctaatgttcctgtttgtctacatcaccactgttatgggaaacatccttatcatcatcacagtgacctctgattcccagctccacacacccatgtactttctgctccgaaacctggctgtcctagacctctgtttctcttcagtcactgctcccaaaatgctagtggacctcctctctgagaagaaaaccatctcttaccagggctgcatgggtcagatcttcttcttccactttttgggaggtgccatggtcttcttcctctcagtgatggcctttgaccgcctcattgccatctcccggcccctccgctatgtcaccgtcatgaacactcagctctgggtggggctggtggtagccacctgggtgggaggctttgtccactctattgtccagctggctctgatgctcccactgcccttctgtggccccaacattttggataacttctactgtgatgttccccaagtactgagacttgcctgcactgacacctcactgctggagttcctcaagatctccaacagtgggctgctggatgtcgtctggttcttcctcctcctgatgtcctacttattcatcctggtgatgctgaggtcacatccaggggaggcaagaaggaaggcagcttccacctgcaccacccacatcatcgtggtttccatgatcttcgttccaagcatttacctctatgcccggcccttcactccattccctatggacaagcttgtgtccatcggccacacagtcatgacccccatgctcaaccccatgatctataccctgaggaaccaggacatgcaggcagcagtgagaagattagggagacaccggctggtttga

SEQ ID NO: 49 - protein, 310 aa, Homo sapiens
MAAKNSSVTEFILEGLTHQPGLRIPLFFLFLGFYTVTVVGNLGLITLIGLNSHLHTPMYFFLFNLSLIDFCFSTTITPKMLMSFVSRKNIISFTGCMTQLFFFCFFVVSESFILSAMAYDRYVAICNPLLYTVTMSCQVCLLLLLGAYGMGFAGAMAHTGSIMNLTFCADNLVNHFMCDILPLLELSCNSSYMNELVVFIVVAVDVGMPIVTVFISYALILSSILHNSSTEGRSKAFSTCSSHIIVVSLFFGSGAFMYLKPLSILPLEQGKVSSLFYTIIVPVLNPLIYSLRNKDVKVALRRTLGRKIFS

SEQ ID NO: 50 - DNA, 933 bp, Homo sapiens
atggcagccaaaaactcttctgtgacagagtttatcctcgaaggcttaacccaccagccgggactgcggatccccctcttcttcctgtttctgggtttctacacggtcaccgtggtggggaacctgggcttgataaccctgattgggctgaactctcacctgcacactcccatgtacttcttcctttttaacctctctttaatagatttctgtttctccactaccatcactcccaaaatgctgatgagttttgtctcaaggaagaacatcatttccttcacagggtgtatgactcagctcttcttcttctgcttctttgtcgtctctgagtccttcatcctgtcagcgatggcgtatgaccgctacgtggccatctgtaacccactgttgtacacagtcaccatgtcttgccaggtgtgtttgctccttttgttgggtgcctatgggatggggtttgctggggccatggcccacacaggaagcataatgaacctgaccttctgtgctgacaaccttgtcaatcatttcatgtgtgacatccttcctctccttgagctctcctgcaacagctcttacatgaatgagctggtggtctttattgtggtggctgttgacgttggaatgcccattgtcactgtctttatttcttatgccctcatcctctccagcattctacacaacagttctacagaaggcaggtccaaagcctttagtacttgcagttcccacataattgtagtttctcttttctttggttctggtgctttcatgtatctcaaacccctttccatcctgcccctcgagcaagggaaagtgtcctccctgttctataccataatagtccccgtgttaaacccattaatctatagcttgaggaacaaggatgtcaaagttgccctgaggagaactttgggcagaaaaatcttttcttaa

SEQ ID NO: 51 - protein, 316 aa, Homo sapiens
MPSQNYSIISEFNLFGFSAFPQHLLPILFLLYLLMFLFTLLGNLLIMATIWIEHRLHTPMYLFLCTLSVSEILFTVAITPRMLADLLSTHHSITFVACANQMFFSFMFGFTHSFLLLVMGYDRYVAICHPLRYNVLMSPRDCAHLVACTWAGGSVMGMMVTTIVFHLTFCGSNVIHHFFCHVLSLLKLACENKTSSVIMGVMLVCVTALIGCLFLIILSYVFIVAAILRIPSAEGRHKTFSTCVSHLTVVVTHYSFASFIYLKPKGLHSMYSDALMATTYTVFTPFLSPIIFSLRNKELKNAINKNFYRKFCPPSS

SEQ ID NO: 52 - DNA, 951 bp, Homo sapiens
atgcctagtcagaactatagcatcatatctgaatttaacctctttggcttctcagccttcccccagcacctcctgcccatcttgttcctgctgtacctcctgatgttcctgttcacattgctgggcaaccttctcatcatggccacaatctggattgaacacagactccacacacccatgtacctcttcttgtgcaccctctccgtctctgagattctgttcactgttgccatcacccctcgcatgctggctgatctgctttccacccatcattccatcacctttgtggcttgtgccaaccagatgttcttctccttcatgtttggcttcactcactccttccttctcctggtcatgggctatgatcgctatgtggccatctgccacccactgcgttacaatgtgctcatgagcccccgtgactgtgcccatcttgtggcctgtacctgggctggtggctcagtcatggggatgatggtgacaacgatagttttccacctcactttctgtgggtctaatgtgatccaccattttttctgtcatgtgctttccctcttgaagttggcctgtgaaaacaagacatcatctgtcatcatgggtgtgatgctggtgtgtgtcacagccctgataggctgtttattcctcatcatcctctcctatgtcttcattgtggctgccatcttgaggattccctctgccgaaggccggcacaagacattttctacgtgtgtatcccacctcactgtggtggtcacgcactatagttttgcctcctttatctacctcaagcccaagggcctccattctatgtacagtgacgccttgatggccaccacctatactgtcttcacccccttccttagcccaatcattttcagcctaaggaacaaggagctgaagaatgccataaataaaaacttttacagaaaattctgtcctccaagttcctga

SEQ ID NO: 53 - protein, 310 aa, Homo sapiens
  MOD_RES (126): Any amino acid
  MOD_RES (146): Any amino acid
  MOD_RES (148): Any amino acid
MPNFTDVTEFTLLGLTCRQELQVLFFVVFLAVYMITLLGNIGMIILISISPQLQSPMYFFLSHLSFADVCFSSNVTPKMLENLLSETKTISYVGCLVQCYFFIAVVHVEVYILAVMAFDRYMAGCXPLLYGSKMSRTVCVRLISVXYXYGFSVSLICTLWTYGLYFCGNFEINHFYCADPPLIQIACGRVHIKEITMIVIAGINFTYSLSVVLISYTLIVVAVLRMRSADGRRKAFSTCGSHLTAVSMFYGTPIFMYLRRPTEESVEQGKMVAVFYTTVIPMLNPMIYSLRNKDVKEAVNKAITKTYVRQ

SEQ ID NO: 54 - DNA, 933 bp, Homo sapiens
  modifed_base (378): a, t, c, or g
  modifed_base (436)..(438): a, t, c, or g
  modifed_base (443)..(444): a, t, c, or g
atgcctaatttcacggatgtgacagaatttactctcctggggctgacctgtcgtcaggagctacaggttctcttttttgtggtgttcctagcggtttacatgatcactctgttgggaaatattggtatgatcattttgattagcatcagtcctcagcttcagagtcccatgtactttttcctgagtcatctgtcttttgcggacgtgtgcttctcctccaacgttacccccaaaatgctggaaaacttattatcagagacaaaaaccatttcctatgtgggatgcttggtgcagtgctactttttcattgccgttgtccacgtggaggtctatatcctggctgtgatggcctttgacaggtacatggccggctgcaancctctgctttatggcagtaaaatgtctaggactgtgtgtgttcggctcatctctgtgnnntatgnntatggattctctgtcagcctaatatgcacactatggacttatggcttatacttctgtggaaactttgaaatcaatcacttctattgtgcagatccccctctcatccagattgcctgtgggagagtgcacatcaaagaaatcacaatgattgttattgctggaattaacttcacatattccctctcggtggtcctcatctcctacactctcattgtagtagctgtgctacgcatgcgctctgccgatggcaggaggaaggcgttctccacctgtgggtcccacttgacggctgtttctatgttttatgggacccccatcttcatgtatctcaggagacccactgaggaatccgtagagcagggcaaaatggtggctgtgttttacaccacagtaattcctatgttgaatcccatgatctacagtctgagaaataaggatgtaaaagaagcagtcaacaaagcaatcaccaagacatatgtgaggcagtaa

SEQ ID NO: 55 - protein, 318 aa, Homo sapiens
MMSFAPNASHSPVFLLLGFSRANISYTLLFFLFLAIYLTTILGNVTLVLLISWDSRLHSPMYYLLRGLSVIDMGLSTVTLPQLLAHLVSHYPTIPAARCLAQFFFFYAFGVTDTLVIAVMALDRYVAICDPLHYALVMNHQRCACLLALSWVVSILHTMLRVGLVLPLCWTGDAGGNVNLPHFFCDHRPLLRASCSDIHSNELAIFFEGGFLMLGPCALIVLSYVRIGAAILRLPSAAGRRRAVSTCGSHLTMVGFLYGTIICVYFQPPFQNSQYQDMVASVMYTAITPLANPFVYSLHNKDVKGALCRLLEWVKVDP

SEQ ID NO: 56 - DNA, 957 bp, Homo sapiens
atgatgagctttgcccctaatgcttcacactctccggtttttttgctccttgggttctcgagagctaacatctcctacactctcctcttcttcctgttcctggctatttacctgaccaccatactggggaatgtgacactggtgctgctcatctcctgggactccagactgcactcacccatgtattatctgcttcgtggcctctctgtgatagacatggggctatccacagttacactgccccagttgctggcccatttggtctctcattacccaaccattcctgctgcccgctgcttggctcagttctttttcttctatgcatttggggttacagatacacttgtcattgctgtcatggctctggatcgctatgtggccatctgtgaccccctgcactatgctttggtaatgaatcaccaacggtgtgcctgcttactagccttgagctgggtggtgtccatactgcacaccatgttgcgtgtgggactcgtcctgcctctttgctggactggggatgctgggggcaacgttaaccttcctcacttcttttgtgaccaccggccacttctgcgagcctcttgttctgacatacattctaatgagctggccatattctttgagggtggcttccttatgctgggcccctgtgccctcattgtactctcttatgtccgaattggggccgctattctacgtttgccttcagctgctggtcgccgccgagcagtctccacctgtggatcccacctcaccatggttggtttcctctacggcaccatcatttgtgtctacttccagcctcccttccagaactctcagtatcaggacatggtggcttcagtaatgtatactgccattacacctttggccaacccatttgtgtatagcctccacaataaggatgtcaagggtgcactctgcaggctgcttgaatgggtgaaggtagacccctga

SEQ ID NO: 57 - protein, 326 aa, Homo sapiens
  MOD_RES (142)..(143): Any amino acid
MGFLSPMHPCRPPTQRRMAAGNHSTVTEFILKGLTKRADLQLPLFLLFLGIYLVTIVGNLGMITLICLNSQLHTPMYYFLSNLSLMDLCYSSVITPKMLVNFVSEKNIISYAGCMSQLYFFLVFVIAECYMLTVMAYDRYVXXCHPLLYNIIMSHHTCLLLVAVVYAIGLIGSTIETGLMLKLPYCEHLISHYFCDILPLMKLSCSSTYDVEMTVFFSAGFNIIVTSLTVLVSYTFILSSILGISTTEGRSKAFSTCSSHLAAVGMFYGSTAFMYLKPSTISSLTQENVASVFYTTVIPMLNPLIYSLRNKEVKAAVQKTLRGKLF

SEQ ID NO: 58 - DNA, 981 bp, Homo sapiens
  modifed_base (425): a, t, c, or g
  modifed_base (427): a, t, c, or g
atggggttcttgtctcccatgcatccctgcaggcctcccacccagaggagaatggctgcaggaaatcactctacagtgacagagttcattctcaagggtttaacgaagagagcagacctccagctccccctctttctcctcttcctcgggatctacttggtcaccatcgtggggaacctgggcatgatcactctaatttgtctgaactctcagctgcacacccccatgtactactttctcagcaatctgtcactcatggatctctgctactcctccgtcattacccctaagatgctggtgaactttgtgtcagagaaaaacatcatctcctacgcagggtgcatgtcacagctctacttcttccttgtttttgtcattgctgagtgttacatgctgacagtgatggcctacgaccgctatgttgncntctgccaccctttgctttacaacatcattatgtctcatcacacctgcctgctgctggtggctgtggtctacgccatcggactcattggctccacaatagaaactggcctcatgttaaaactgccctattgtgagcacctcatcagtcactacttctgtgacatcctccctctcatgaagctgtcctgctctagcacctatgatgttgagatgacagtcttcttttcggctggattcaacatcatagtcacgagcttaacagttcttgtttcttacaccttcattctctccagcatcctcggcatcagcaccacagaggggagatccaaagccttcagcacctgcagctcccaccttgcagccgtgggaatgttctatggatcaactgcattcatgtacttaaaaccctccacaatcagttccttgacccaggagaatgtggcctctgtgttctacaccacggtaatccccatgttgaatcccctaatctacagcctgaggaacaaggaagtaaaggctgccgtgcagaaaacgctgaggggtaaactgttttga

SEQ ID NO: 59 - protein, 311 aa, Homo sapiens
MGTGNDTTVVEFTLLGLSEDTTVCAILFLVFLGIYVVTLMGNISIIVLIRRSHHLHTPMYIFLCHLAFVDIGYSSSVTPVMLMSFLRKETSLPVAGCVAQLCSVVTFGTAECFLLAAMAYDRYVAICSPLLYSTCMSPGVCIILVGMSYLGGCVNAWTFIGCLLRLSFCGPNKVNHFFCDYSPLLKLACSHDFTFEIIPAISSGSIIVATVCVIAISYIYILITILKMHSTKGRHKAFSTCTSHLTAVTLFYGTITFIYVMPKSSYSTDQNKVVSVFYTVVIPMLNPLIYSLRNKEIKGALKRELRIKIFS

SEQ ID NO: 60 - DNA, 936 bp, Homo sapiens
atggggactggaaatgacaccactgtggtagagtttactcttttggggttatctgaggatactacagtttgtgctattttatttcttgtgtttctaggaatttatgttgtcaccttaatgggtaatatcagcataattgtattgatcagaagaagtcatcatcttcatacacccatgtacattttcctctgccatttggcctttgtagacattgggtactcctcatcagtcacacctgtcatgctcatgagcttcctaaggaaagaaacctctctccctgttgctggttgtgtggcccagctctgttctgtagtgacgtttggtacggccgagtgcttcctgctggctgccatggcctatgatcgctatgtggccatctgctcacccctgctctactctacctgcatgtcccctggagtctgcatcatcttagtgggcatgtcctacctgggtggatgtgtgaatgcttggacattcattggctgcttattaagactgtccttctgtgggccaaataaagtcaatcactttttctgtgactattcaccacttttgaagcttgcttgttcccatgattttacttttgaaataattccagctatctcttctggatctatcattgtggccactgtgtgtgtcatagccatatcctacatctatatcctcatcaccatcctgaagatgcactccaccaagggccgccacaaggccttctccacctgcacctcccacctcactgcagtcactctgttctatgggaccattaccttcatttatgtgatgcccaagtccagctactcaactgaccagaacaaggtggtgtctgtgttctacaccgtggtgattcccatgttgaaccccctgatctacagcctcaggaacaaggagattaagggggctctgaagagagagcttagaataaaaatattttcttga

SEQ ID NO: 61 - protein, 322 aa, Homo sapiens
MNSLKDGNHTALTGFILLGLTDDPILRVILFMIILSGNLSIIILIRISSQLHHPMYFFLSHLAFADMAYSSSVTPNMLVNFLVERNTVSYLGCAIQLGSAAFFATVECVLLAAMAYDRFVAICSPLLYSTKMSTQVSVQLLLVVYIAGFLIAVSYTTSFYFLLFCGPNQVNHFFCDFAPLLELSCSDISVSTVVLSFSSGSIIVVTVCVIAVCYIYILITILKMRSTEGHHKAFSTCTSHLTVVTLFYGTITFIYVMPNFSYSTDQNKVVSVLYTVVIPMLNPLIYSLRNKEIKGALKRELVRKILSHDACYFSRTSNNDIT

SEQ ID NO: 62 - DNA, 969 bp, Homo sapiens
atgaattccctgaaggacgggaatcacaccgctctgacggggttcatcctattgggcttaacagatgatccaatccttcgagtcatcctcttcatgatcatcctatctggtaatctcagcataattattcttatcagaatttcttctcagctccatcatcctatgtatttctttctgagccacttggcttttgctgacatggcctattcatcttctgtcacacccaacatgcttgtaaacttcctggtggagagaaatacagtctcctaccttggatgtgccatccagcttggttcagcggctttctttgcaacagtcgaatgcgtccttctggctgccatggcctatgaccgctttgtggcaatttgcagtccactgctttattcaaccaaaatgtccacacaagtcagtgtccagctactcttagtagtttacatagctggttttctcattgctgtctcctatactacttccttctattttttactcttctgtggaccaaatcaagtcaatcattttttctgtgatttcgctcccttacttgaactctcctgttctgatatcagtgtctccacagttgttctctcattttcttctggatccatcattgtggtcactgtgtgtgtcatagccgtctgctacatctatatcctcatcaccatcctgaagatgcgctccactgaggggcaccacaaggccttctccacctgcacttcccacctcactgtggttaccctgttctatgggaccattaccttcatttatgtgatgcccaattttagctactcaactgaccagaacaaggtggtgtctgtgttgtacacagtggtgattcccatgttgaaccccctgatctacagcctcaggaacaaggagattaagggggctctgaagagagagcttgttagaaaaatactttctcatgatgcttgttattttagtagaacttcaaataatgatattacatag

SEQ ID NO: 63 - protein, 332 aa, Homo sapiens
MLEGVEHLLLLLLLTDVNSKELQSGNQTSVSHFILVGLHHPPQLGAPLFLAFLVIYLLTVSGNGLIILTVLVDIRLHRPMCLFLCHLSFLDMTISCAIVPKMLAGFLLGSRIISFGGCVIQLFSFHFLGCTECFLYTLMAYDRFLAICKPLHYATIMTHRVCNSLALGTWLGGTIHSLFQTSFVFRLPFCGPNRVDYIFCDIPAMLRLACADTAINELVTFADIGFLALTCFMLILTSYGYIVAAILRIPSADGRRNAFSTCAAHLTVVIVYYVPCTFIYLRPCSQEPLDGVVAVFYTVITPLLNSIIYTLCNKEMKAALQRLGGHKEVQPH

SEQ ID NO: 64 - DNA, 999 bp, Homo sapiens
atgttagagggtgttgagcatctccttctgctacttcttttgacagatgtgaacagcaaggaactgcaaagtggaaaccagacttctgtgtctcacttcattttggtgggcctgcaccacccaccacagctgggagcgccactcttcttagctttccttgtcatctatctcctcactgtttctggaaatgggctcatcatcctcactgtcttagtggacatccggctccatcgtcccatgtgcttgttcctgtgtcacctctccttcttggacatgaccatttcttgtgctattgtccccaagatgctggctggctttctcttgggtagtaggattatctcctttgggggctgtgtaatccaactattttctttccatttcctgggctgtactgagtgcttcctttacacactcatggcttatgaccgtttccttgccatttgtaagcccttacactatgctaccatcatgacccacagagtctgtaactccctggctttaggcacctggctgggagggactatccattcacttttccaaacaagttttgtattccggctgcccttctgtggccccaatcgggtcgactacatcttctgtgacattcctgccatgctgcgtctagcctgcgccgatacggccatcaacgagctggtcacctttgcagacattggcttcctggccctcacctgcttcatgctcatcctcacttcctatggctatattgtagctgccatcctgcgaattccgtcagcagatgggcgccgcaatgccttctccacttgtgctgcccacctcactgttgtcattgtttactatgtgccctgcaccttcatttacctgcggccttgttcacaggagcccctggatggggtggtagctgtcttttacactgtcatcactcccttgcttaactccatcatctacacactgtgcaacaaagaaatgaaggcagcattacagaggctagggggccacaaggaagtgcagcctcactga

SEQ ID NO: 65 - protein, 312 aa, Homo sapiens
MEPLNRTEVSEFFLKGFSGYPALEHLLFPLCSAMYLVTLLGNTAIMAVSVLDIHLHTPVYFFLGNLSTLDICYTPTFVPLMLVHLLSSRKTISFAVCAIQMCLSLSTGSTECLLLAITAYDRYLAICQPLRYHVLMSHRLCVLLMGAAWVLCLLKSVTEMVISMRLPFCGHHVVSHFTCKILAVLKLACGNTSVSEDFLLAGSILLLPVPLAFICLSYLLILATILRVPSAARCCKAFSTCLAHLAVVLLFYGTIIFMYLKPKSKEAHISDEVFTVLYAMVTTMLNPTIYSLRNKEVKEAARKVWGRSRASR

SEQ ID NO: 66 - DNA, 939 bp, Homo sapiens
atggagccgctcaacagaacagaggtgtccgagttctttctgaaaggattttctggctacccagccctggagcatctgctcttccctctgtgctcagccatgtacctggtgaccctcctggggaacacagccatcatggcggtgagcgtgctagatatccacctgcacacgcccgtgtacttcttcctgggcaacctctctaccctggacatctgctacacgcccacctttgtgcctctgatgctggtccacctcctgtcatcccggaagaccatctcctttgctgtctgtgccatccagatgtgtctgagcctgtccacgggctccacggagtgcctgctactggccatcacggcctatgaccgctacctggccatctgccagccactcaggtaccacgtgctcatgagccaccggctctgcgtgctgctgatgggagctgcctgggtcctctgcctcctcaagtcggtgactgagatggtcatctccatgaggctgcccttctgtggccaccacgtggtcagtcacttcacctgcaagatcctggcagtgctgaagctggcatgcggcaacacgtcggtcagcgaagacttcctgctggcgggctccatcctgctgctgcctgtacccctggcattcatctgcctgtcctacttgctcatcctggccaccatcctgagggtgccctcggccgccaggtgctgcaaagccttctccacctgcttggcacacctggctgtagtgctgcttttctacggcaccatcatcttcatgtacttgaagcccaagagtaaggaagcccacatctctgatgaggtcttcacagtcctctatgccatggtcacgaccatgctgaaccccaccatctacagcctgaggaacaaggaggtgaaggaggccgccaggaaggtgtggggcaggagtcgggcctccaggtga

SEQ ID NO: 67 - protein, 305 aa, Homo sapiens [sequence omitted]

SEQ ID NO: 68 - DNA, 918 bp, Homo sapiens
atgtatctggtcacggtgctgaggaacctgctcagcatcctggctgtcagctctgactcccacccccacacacccatgtacttcttcctctccaacctgtgctgggctgacatcggtttcaccttggccacggttcccaaaatgattgtggacatggggtcgcatagcaaagtcatctcttatgggggctgcctgacacagatgtctttcttggtactttttgcatgtatagtagacatgttcctgactgtgatggcttatgactgctttgtagccatctgtcgccctctgcactacccagtcatcgtgaatcctcacctctgtgtcttcttcgttttggtgtcctttttccttagcctgttggattcccagctgcacagttggattgtgttacaattcaccttcttcaagaatgtggaaatctctaattttgtctgtgagccatctcaacttctcaagcttgcctcttatgacagcgtcatcaatagcatattcatatattttgataatactatgtttggttttcttcccatttcagggatccttttgtcttactataaaattgtcccctccattctaaggatttcatcatcagatgggaagtacaaagccttctcagcctgtggctgtcacctggcagttgtttgcttattttatggaacaggcattggcgtgtacctgacttcagctgtggcaccacccctcaggaatggtatggtggcgtcagtgatgtacgctgtggtcacccccatgctgaaccctttcatctacagcctgagaaacagggacattcaaagtgccctgtggagggtgtgcaacaaaacagtcgaatctcatgatctgttccatcctttttcttgtgtggttgagaaagggcaaccacattcaatccctacatctgcaaatcctgccccttag

SEQ ID NO: 69 - protein, 319 aa, Homo sapiens
MEKANETSPVMGFVLLRLSAHPELEKTFFVLILLMYLVILLGNGVLILVTILDSRLHTPMYFFLGNLSFLDICFTTSSVPLVLDSFLTPQETISFSACAVQMALSFAMAGTECLLLSMMAFDRYVAICNPLRYSVIMSKAAYMPMAASSWAIGGAASVVHTSLAIQLPFCGDNVINHFTCEILAVLKLACADISINVISMEVTNVIFLGVPVLFISFSYVFIITTILRIPSAEGRKKVFSTCSAHLTVVIVFYGTLFFMYGKPKSKDSMGADKEDLSDKLIPLFYGVVTPMLNPIIYSLRNKDVKAAVRRLLRPKGFTQ

SEQ ID NO: 70 - DNA, 960 bp, Homo sapiens
atggaaaaagccaatgagacctcccctgtgatggggttcgttctcctgaggctctctgcccacccagagctggaaaagacattcttcgtgctcatcctgctgatgtacctcgtgatcctgctgggcaatggggtcctcatcctggtgaccatccttgactcccgcctgcacacgcccatgtacttcttcctagggaacctctccttcctggacatctgcttcactacctcctcagtcccactggtcctggacagctttttgactccccaggaaaccatctccttctcagcctgtgctgtgcagatggcactctcctttgccatggcaggaacagagtgcttgctcctgagcatgatggcatttgatcgctatgtggccatctgcaacccccttaggtactccgtgatcatgagcaaggctgcctacatgcccatggctgccagctcctgggctattggtggtgctgcttccgtggtacacacatccttggcaattcagctgcccttctgtggagacaatgtcatcaaccacttcacctgtgagattctggctgttctaaagttggcctgtgctgacatttccatcaatgtgatcagcatggaggtgacgaatgtgatcttcctaggagtcccggttctgttcatctctttctcctatgtcttcatcatcaccaccatcctgaggatcccctcagctgaggggaggaaaaaggtcttctccacctgctctgcccacctcaccgtggtgatcgtcttctacgggaccttattcttcatgtatgggaagcctaagtctaaggactccatgggagcagacaaagaggatctttcagacaaactcatcccccttttctatggggtggtgaccccgatgctcaaccccatcatctatagcctgaggaacaaggatgtgaaggctgctgtgaggagactgctgagaccaaaaggcttcactcagtga

SEQ ID NO: 71 - protein, 300 aa, Homo sapiens [sequence omitted]

SEQ ID NO: 72 - DNA, 903 bp, Homo sapiens
atgtacctggtcacggtgctgaggaacctgctcatcatcctggctgtcagctctgactcccacctccacacccccatgtgcttcttcctctccaacctgtgctgggctgacatcggtttcacctcggccatggttcccaagatgattgtggacatgcagtcgcatagcagagtcatctcttatgcgggctgcctgacacagatgtctttctttgtcctttttgcatgtatagaagacatgctcctgacagtgatggcctatgaccgatttgtggccatctgtcaccccctgcactacccagtcatcatgaatcctcaccttggtgtcttcttagttttggtgtcctttttcctcagcctgttggattcccagctgcacagttggattgtgttacaattcaccttcttcaagaatgtggaaatctccaattttgtctgtgacccatctcaacttctcaaccttgcctgttctgacagtgtcatcaatagcatattcatatatttagatagtattatgtttggttttcttcccatttcagggatccttttgtcttacgctaacaatgtcccctccattctaagaatttcatcatcagataggaagtctaaagccttctccacctgtggctctcacctggcagttgtttgcttattttatggaacaggcattggcgtgtacctgacttcagctgtgtcaccaccccccaggaatggtgtggtggcatcagtgatgtacgctgtggtcacccccatgctgaaccctttcatctacagcctgagaaatagggacattcaaagtgccctgtggaggctgcgcagcagaacagtcgaatctcatgatctgttatctcaagatctgctccatcctttttcttgtgtgggtgagaaaggtcaaccacattaa

SEQ ID NO: 73 - protein, 314 aa, Homo sapiens
MGVKNHSTVTEFLLSGLTEQAELQLPLFCLFLGIYTVTVVGNLSMISIIRLNRQLHTPMYYFLSSLSFLDFCYSSVITPKMLSGFLCRDRSISYSGCMIQLFFFCVCVISECYMLAAMACDRYVAICSPLLYRVIMSPRVCSLLVAAVFSVGFTDAVIHGGCILRLSFCGSNIIKHYFCDIVPLIKLSCSSTYIDELLIFVIGGFNMVATSLTIIISYAFILTSILRIHSKKGRCKAFSTCSSHLTAVLMFYGSLMSMYLKPASSSSLTQEKVSSVFYTTVILMLNPLIYSLRNNEVRNALMKLLRRKISLSPG

SEQ ID NO: 74 - DNA, 945 bp, Homo sapiens
atgggtgtaaaaaaccattccacagtgactgagtttcttctttcaggattaactgaacaagcagagcttcagctgcccctcttctgcctcttcttaggaatttacacagttactgtggtgggaaacctcagcatgatctcaattattaggctgaatcgtcaacttcatacccccatgtactatttcctgagtagtttgtcttttttagatttctgctattcttctgtcattacccctaaaatgctatcagggtttttatgcagagatagatccatctcctattctggatgcatgattcagctgttttttttctgtgtttgtgttatttctgaatgctacatgctggcagccatggcctgcgatcgctacgtggccatctgcagcccactgctctacagggtcatcatgtcccctagggtctgttctctgctggtggctgctgtcttctcagtaggtttcactgatgctgtgatccatggaggttgtatactcaggttgtctttctgtggatcaaacatcattaaacattatttctgtgacattgtccctcttattaaactctcctgctccagcacttatattgatgagcttttgatttttgtcattggtggatttaacatggtggccacaagcctaacaatcattatttcatatgcttttatcctcaccagcatcctgcgcatccactctaaaaagggcaggtgcaaagcgtttagcacctgtagctcccacctgacagctgttcttatgttttatgggtctctgatgtccatgtatctcaaacctgcttctagcagttcactcacccaggagaaagtatcctcagtattttataccactgtgattctcatgttgaatcccttgatatatagtctgaggaacaatgaagtaagaaatgctctgatgaaacttttaagaagaaaaatatctttatctccaggataa

SEQ ID NO: 75 - protein, 311 aa, Homo sapiens
MSNATLLTAFILTGLPHAPGLDAPLFGIFLVVYVLTVLGNLLILLVIRVDSHLHTPMYYFLTNLSFIDMWFSTVTVPKMLMTLVSPSGRTISFHSCVAQLYFFHFLGSTECFLYTVMSYDRYLAISYPLRYTNMMTGRSCALLATGTWLSGSLHSAVQTILTFHLPYCGPNQIQHYFCDAPPILKLACADTSANEMVIFVNIGLVASGCFVLIVLSYVSIVCSILRIRTSEGRHRAFQTCASHCIVVLCFFGPGLFIYLRPGSRDALHGVVAVFYTTLTPLFNPVVYTLRNKEVKKALLKLKNGSVFAQGE

SEQ ID NO: 76 - DNA, 936 bp, Homo sapiens
atgtccaacgccaccctactgacagcgttcatcctcacgggccttccccatgccccagggctggacgcccccctctttggaatcttcctggtggtttacgtgctcactgtgctggggaacctcctcatcctgctggtgatcagggtggattctcacctccacacccccatgtactacttcctcaccaacctgtccttcattgacatgtggttctccactgtcacggtgcccaaaatgctgatgaccttggtgtccccaagcggcaggactatctccttccacagctgcgtggctcagctctattttttccacttcctggggagcaccgagtgtttcctctacacagtcatgtcctatgatcgctacctggccatcagttacccgctcaggtacaccaacatgatgactgggcgctcgtgtgccctcctggccaccggcacttggctcagtggctctctgcactctgctgtccagaccatattgactttccatttgccctactgtggacccaaccagatccagcactacttctgtgacgcaccgcccatcctgaaactggcctgtgcagacacctcagccaacgagatggtcatctttgtgaatattgggctagtggcctcgggctgctttgtcctgatagtgctgtcctatgtgtccatcgtctgttccatcctgcggatccgcacctcagaggggaggcacagagcctttcagacctgtgcctcccactgtatcgtggtcctttgcttctttggccctggtcttttcatttacctgaggccaggctccagggacgccttgcatggggttgtggccgttttctacaccacgctgactcctcttttcaaccctgttgtgtacaccctgagaaacaaggaggtaaagaaagctctgttgaagctgaaaaatgggtcagtatttgctcagggtgaatag

SEQ ID NO: 77 - protein, 323 aa, Homo sapiens
MNPENWTQVTSFVLLGFPSSHLIQFLVFLGLMVTYIVTATGKLLIIVLSWIDQRLHIQMYFFLRNFSFLELLLVTVVVPKMLVVILTGDHTISFVSCIIQSYLYFFLGTTDFFLLAVMSLDRYLAICRPLRYETLMNGHVCSQLVLASWLAGFLWVLCPTVLMASLPFCGPNGIDHFFRDSWPLLRLSCGDTHLLKLVAFMLSTLVLLGSLALTSVSYACILATVLRAPTAAERRKAFSTCASHLTVVVIIYGSSIFLYIRMSEAQSKLLNKGASVLSCIITPLLNPFIFTLRNDKVQQALREALGWPRLTAVMKLRVTSQRK

SEQ ID NO: 78 - DNA, 972 bp, Homo sapiens
atgaaccctgaaaactggactcaggtaacaagctttgtccttctgggtttccccagtagccacctcatacagttcctggtgttcctggggttaatggtgacctacattgtaacagccacaggcaagctgctaattattgtgctcagctggatagaccaacgcctgcacatacagatgtacttcttcctgcggaatttctccttcctggagctgttgctggtaactgttgtggttcccaagatgcttgtcgtcatcctcacgggggatcacaccatctcatttgtcagctgcatcatccagtcctacctctacttctttctaggcaccactgacttcttcctcttggccgtcatgtctctggatcgttacctggcaatctgccgaccactccgctatgagaccctgatgaatggccatgtctgttcccaactagtgctggcctcctggctagctggattcctctgggtcctttgccccactgtcctcatggccagcctgcctttctgtggccccaatggtattgaccacttctttcgtgacagttggcccttgctcaggctttcttgtggggacacccacctgctgaaactggtggctttcatgctctctacgttggtgttactgggctcactggctctgacctcagtttcctatgcctgcattcttgccactgttctcagggcccctacagctgctgagcgaaggaaagcgttttccacttgcgcctcgcatcttacagtggtggtcatcatctatggcagttccatctttctctacattcgtatgtcagaggctcagtccaaactgctcaacaaaggtgcctccgtcctgagctgcatcatcacacccctcttgaacccattcatcttcactctccgcaatgacaaggtgcagcaagcactgagagaagccttggggtggcccaggctcactgctgtgatgaaactgagggtcacaagtcaaaggaaatga

SEQ ID NO: 79 - protein, 318 aa, Homo sapiens
MNPANHSQVAGFVLLGLSQVWELRFVFFTVFSAVYFMTVVGNLLIVVIVTSDPHLHTTMYFLLGNLSFLDFCYSSITAPRMLVDLLSGNPTISFGGCLTQLFFFHFIGGIKIFLLTVMAYDRYIAISQPLHYTLIMNQTVCALLMAASWVGGFIHSIVQIALTIQLPFCGPDKLDNFYCDVPQLIKLACTDTFVLELLMVSNNGLVTLMCFLVLLGSYTALLVMLRSHSREGRSKALSTCASHIAVVTLIFVPCIYVYTRPFRTFPMDKAVSVLYTIVTPMLNPAIYTLRNKEVIMAMKKLWRRKKDPIGPLEHRPLH

SEQ ID NO: 80 - DNA, 957 bp, Homo sapiens
atgaatccagcaaatcattcccaggtggcaggatttgttctactggggctctctcaggtttgggagcttcggtttgttttcttcactgttttctctgctgtgtattttatgactgtagtgggaaaccttcttattgtggtcatagtgacctccgacccacacctgcacacaaccatgtattttctcttgggcaatctttctttcctggacttttgctactcttccatcacagcacctaggatgctggttgacttgctctcaggcaaccctaccatttcctttggtggatgcctgactcaactcttcttcttccacttcattggaggcatcaagatcttcctgctgactgtcatggcgtatgaccgctacattgccatttcccagcccctgcactacacgctcattatgaatcagactgtctgtgcactccttatggcagcctcctgggtggggggcttcatccactccatagtacagattgcattgactatccagctgccattctgtgggcctgacaagctggacaacttttattgtgatgtgcctcagctgatcaaattggcctgcacagatacctttgtcttagagcttttaatggtgtctaacaatggcctggtgaccctgatgtgttttctggtgcttctgggatcgtacacagcactgctagtcatgctccgaagccactcacgggagggccgcagcaaggccctgtctacctgtgcctctcacattgctgtggtgaccttaatctttgtgccttgcatctacgtctatacaaggccttttcggacattccccatggacaaggccgtctctgtgctatacacaattgtcacccccatgctgaatcctgccatctataccctgagaaacaaggaagtgatcatggccatgaagaagctgtggaggaggaaaaaggaccctattggtcccctggagcacagacccttacattag

SEQ ID NO: 81 - protein, 324 aa, Homo sapiens
MQKPQLLVPIIATSNGNLVHAAYFLLVGIPGLGPTIHFWLAFPLCFMYALATLGNLTIVLIIRVERRLHEPMYLFLAMLSTIDLVLSSITMPKMASLFLMGIQEIEFNICLAQMFLIHALSAVESAVLLAMAFDRFVAICHPLRHASVLTGCTVAKIGLSALTRGFVFFFPLPFILKWLSYCQTHTVTHSFCLHQDIMKLSCTDTRVNVVYGLFIILSVMGVDSLFIGFSYILILWAVLELSSRRAALKAFNTCISHLCAVLVFYVPLIGLSVVHRLGGPTSLLHVVMANTYLLLPPVVNPLVYGAKTKEICSRVLCMFSQGGK

SEQ ID NO: 82 - DNA, 975 bp, Homo sapiens
atgcagaagccccagctcttggtccctatcatagccacttcaaatggaaatctggtccacgcagcatacttccttttggtgggtatccctggcctggggcctaccatacacttttggctggctttcccactgtgttttatgtatgccttggccaccctgggtaacctgaccattgtcctcatcattcgtgtggagaggcgactgcatgagcccatgtacctcttcctggccatgctttccactattgacctagtcctctcctctatcaccatgcccaagatggccagtcttttcctgatgggcatccaggagatcgagttcaacatttgcctggcccagatgttccttatccatgctctgtcagccgtggagtcagctgtcctgctggccatggcttttgaccgctttgtggccatttgccacccattgcgccatgcttctgtgctgacagggtgtactgtggccaagattggactatctgccctgaccagggggtttgtattcttcttcccactgcccttcatcctcaagtggttgtcctactgccaaacacatactgtcacacactccttctgtctgcaccaagatattatgaagctgtcctgtactgacaccagggtcaatgtggtttatggactcttcatcatcctctcagtcatgggtgtggactctctcttcattggcttctcatatatcctcatcctgtgggctgttttggagctgtcctctcggagggcagcactcaaggctttcaacacctgcatctcccacctctgtgctgttctggtcttctatgtacccctcattgggctctcggtggtgcataggctgggtggtcccacctccctcctccatgtggttatggctaatacctacttgctgctaccacctgtagtcaacccccttgtctatggagccaagaccaaagagatctgttcaagggtcctctgtatgttctcacaaggtggcaagtga

SEQ ID NO: 83 - protein, 320 aa, Homo sapiens
MSSCNFTHATFVLIGIPGLEKAHFWVGFPLLSMYVVAMFGNCIVVFIVRTERSLHAPMYLFLCMLAAIDLALSTSTMPKILALFWFDSREISFEACLTQMFFIHALSAIESTILLAMAFDRYVAICHPLRHAAVLNNTVTAQIGIVAVVRGSLFFFPLPLLIKRLAFCHSNVLSHSYCVHQDVMKLAYADTLPNVVYGLTAILLVMGVDVMFISLSYFLIIRTVLQLPSKSERAKAFGTCVSHIGVVLAFYVPLIGLSVVHRFGNSLHPIVRVVMGDIYLLLPPVINPIIYGAKTKQIRTRVLAMFKISCDKDLQAVGGK

SEQ ID NO: 84 - DNA, 963 bp, Homo sapiens
atgagttcctgcaacttcacacatgccacctttgtgcttattggtatcccaggattagagaaagcccatttctgggttggcttccccctcctttccatgtatgtagtggcaatgtttggaaactgcatcgtggtcttcatcgtaaggacggaacgcagcctgcacgctccgatgtacctctttctctgcatgcttgcagccattgacctggccttatccacatccaccatgcctaagatccttgcccttttctggtttgattcccgagagattagctttgaggcctgtcttacccagatgttctttattcatgccctctcagccattgaatccaccatcctgctggccatggcctttgaccgttatgtggccatctgccacccactgcgccatgctgcagtgctcaacaatacagtaacagcccagattggcatcgtggctgtggtccgcggatccctcttttttttcccactgcctctgctgatcaagcggctggccttctgccactccaatgtcctctcgcactcctattgtgtccaccaggatgtaatgaagttggcctatgcagacactttgcccaatgtggtatatggtcttactgccattctgctggtcatgggcgtggacgtaatgttcatctccttgtcctattttctgataatacgaacggttctgcaactgccttccaagtcagagcgggccaaggcctttggaacctgtgtgtcacacattggtgtggtactcgccttctatgtgccacttattggcctctcagtggtacaccgctttggaaacagccttcatcccattgtgcgtgttgtcatgggtgacatctacctgctgctgcctcctgtcatcaatcccatcatctatggtgccaaaaccaaacagatcagaacacgggtgctggctatgttcaagatcagctgtgacaaggacttgcaggctgtgggaggcaagtga

SEQ ID NO: 85 - protein, 314 aa, Homo sapiens
MLPSNITSTHPAVFLLVGIPGLEHLHAWISIPFCFAYTLALLGNCTLLFIIQADAALHEPMYLFLAMLATIDLVLSSTTLPKMLAIFWFRDQEINFFACLVQMFFLHSFSIMESAVLLAMAFDRYVAICKPLHYTTVLTGSLITKIGMAAVARAVTLMTPLPFLLRRFHYCRGPVIAHCYCEHMAVVRLACGDTSFNNIYGIAVAMFSVVLDLLFVILSYVFILQAVLQLASQEARYKAFGTCVSHIGAILSTYTPVVISSVMHRVARHAAPRVHILLAIFYLLFPPMVNPIIYGVKTKQIREYVLSLFQRKNM

SEQ ID NO: 86 - DNA, 1400 bp, Homo sapiens
tggaaacaagaggtaatctttgcaggtgggatagcacaggttgaactctaatcatatatactgtagaaggtatatatagaaggtgaagaagccctgtaaaaattgacaaggagatttccaggagccatgcttccctctaatatcacctcaacacatccagctgtctttttgttggtaggaattcctggtttggaacacctgcatgcctggatctccatccccttctgctttgcttatactctggccctgctaggcaactgtacccttctcttcattatccaggctgatgcagccctccatgaacccatgtacctctttctggccatgttggcaaccattgacttggttctttcttctacaacgctgcccaaaatgcttgccatattctggttcagggatcaggagatcaacttctttgcctgtctggtccagatgttcttccttcactccttctccatcatggagtcagcagtgctgctggccatggcctttgaccgctatgtggccatctgcaagccattgcactacacgacggtcctgactgggtccctcatcaccaagattggcatggctgctgtggcccgggctgtgacactaatgactccactccccttcctgctcagacgcttccactactgccgaggcccagtgattgcccattgctactgtgaacacatggctgtggtaaggctggcgtgtggggacactagcttcaacaatatctatggcattgctgtggccatgtttagtgtggtgttggacctgctctttgttatcctgtcttatgtcttcatccttcaggcagttctccagcttgcctctcaggaggcccgctacaaagcatttgggacatgtgtgtctcacataggtgccatcctgtccacctacactccagtagtcatctcttcagtcatgcaccgtgtagcccgccatgctgcccctcgtgtccacatactccttgctattttctatctccttttcccacccatggtcaatcctatcatatatggagtcaagaccaagcagattcgtgagtatgtgctcagtctattccagagaaagaacatgtagatggatagttctctttttttatcccacttgccaagtaatgagaatgctggattggggttgaggggaaaaatctaaataggaaaattgcagagtatctttgacaattctctagtatgataaggaaaatgaggtttcattcctcacagatctacgagtcaggtcaaaccaggagtgcacctatagtctggtctgatagtagaggtttgaccttcccattgtcatagactcatcacatggctaaggaagacaaacctctcaaagtggtattgtaatctgggtgaaagacagtaggacctttattggctgagattggcccaaacagctgagtc

SEQ ID NO: 87 - protein, 384 aa, Homo sapiens
  MOD_RES (68): Any amino acid
MNIKHCGWHMIHTWLNIREDDDSDFKNFIGQIQGLSGNPHSTTSRMYFLCFCTSLLGFKVHWVSRLIXKLYMASPNNDSTAPVSEFLLICFPNFQSWQHWLSLPLSLLFLLAMGANTTLLITIQLEASLHQPLYYLLSLLSLLDIVLCLTVIPKVLAIFWFDLRSISFPACFLQMFIMNSFLTMESCTFMVMAYDRYVAICHPLRYPSIITDQFVARAVVFVIARNAFVSLPVPMLSARLRYCAGNIIKNCICSNLSVSKLSCDDITFNQLYQFVAGWTLLGSDLILIVISYSFILKVVLRIKAEGAVAKALSTCGSHFILILFFSTVLLVLVITNLARKRIPPDVPILLNILHHLIPPALNPIVYGVRTKEIKQGIQNLLKRL

SEQ ID NO: 88 - DNA, 1155 bp, Homo sapiens
  modifed_base (203): a, t, c, or g
atgaatataaaacattgtggctggcatatgatacatacttggttaaatataagggaggatgatgacagtgattttaaaaactttattggacagatacagggcctcagtggaaacccacactctactacgtctagaatgtactttttatgtttctgtacttctctactaggttttaaggtacactgggtctccagattgatcangaaactttacatggcatctcccaacaatgactccactgccccagtctctgaattcctcctcatctgcttccccaacttccagagctggcagcactggttgtctctgcccctcagccttctcttcctcctggccatgggagctaacaccaccctcctgatcaccatccagctggaggcctctctgcaccagcccctgtactacctgctcagcctcctctccctgctggacatcgtgctctgcctcaccgtcatccccaaggtcctggccatcttctggtttgacctcaggtcgatcagcttcccagcctgcttcctccagatgttcatcatgaacagttttttgaccatggagtcctgcacgttcatggtcatggcctatgaccgttatgtggccatctgccatccattgagatacccgtctatcatcactgaccagtttgtggctagggccgtggtctttgttatagcccggaatgcctttgtttctcttcctgttcccatgctttctgccaggctcagatactgtgcaggaaacataatcaagaactgcatctgcagtaacctgtctgtgtccaaactctcttgtgatgacatcactttcaatcagctctaccagtttgtggcaggctggactctgttgggctctgatcttatccttattgttatctcctattcttttatattgaaagttgtgcttaggatcaaggccgagggtgctgtggccaaggccttgagcacgtgtggttcccacttcatcctcatcctcttcttcagcacagtcctgctggttctggtcatcactaacctggccaggaagagaattcctccagatgtccccatcctgctcaacatcctgcaccacctcattcccccagctctgaaccccattgtttatggtgtgagaaccaaggagatcaagcagggaatccaaaacctgctgaagaggttgtaa

SEQ ID NO: 89 - protein, 314 aa, Homo sapiens
MSASNITLTHPTAFLLVGIPGLEHLHIWISIPFCLAYTLALLGNCTLLLIIQADAALHEPMYLFLAMLAAIDLVLSSSALPKMLAIFWFRDREINFFACLAQMFFLHSFSIMESAVLLAMAFDRYVAICKPLHYTKVLTGSLITKIGMAAVARAVTLMTPLPFLLRCFHYCRGPVIAHCYCEHMAVVRLACGDTSFNNIYGIAVAMFIVVLDLLLVILSYIFILQAVLLLASQEARYKAFGTCVSHIGAILAFYTTVVISSVMHRVARHAAPHVHILLANFYLLFPPMVNPIIYGVKTKQIRESILGVFPRKDM

SEQ ID NO: 90 - DNA, 945 bp, Homo sapiens
atgtcagcctccaatatcaccttaacacatccaactgccttcttgttggtggggattccaggcctggaacacctgcacatctggatctccatccctttctgcttagcatatacactggccctgcttggaaactgcactctccttctcatcatccaggctgatgcagccctccatgaacccatgtacctctttctggccatgttggcagccatcgacctggtcctttcctcctcagcactgcccaaaatgcttgccatattctggttcagggatcgggagataaacttctttgcctgtctggcccagatgttcttccttcactccttctccatcatggagtcagcagtgctgctggccatggcctttgaccgctatgtggctatctgcaagccactgcactacaccaaggtcctgactgggtccctcatcaccaagattggcatggctgctgtggcccgggctgtgacactaatgactccactccccttcctgctgagatgtttccactactgccgaggcccagtgatcgctcactgctactgtgaacacatggctgtggtgaggctggcgtgtggggacactagcttcaacaatatctatggcatcgctgtggccatgtttattgtggtgttggacctgctccttgttatcctgtcttatatctttattcttcaggcagttctactgcttgcctctcaggaggcccgctacaaggcatttgggacatgtgtctctcatataggtgccatcttagccttctacacaactgtggtcatctcttcagtcatgcaccgtgtagcccgccatgctgcccctcatgtccacatcctccttgccaatttctatctgctcttcccacccatggtcaatcccataatctatggtgtcaagaccaagcaaatccgtgagagcatcttgggagtattcccaagaaaggatatgtag

SEQ ID NO: 91 - protein, 318 aa, Homo sapiens
MMVDPNGNESSATYFILIGLPGLEEAQFWLAFPLCSLYLIAVLGNLTIIYIVRTEHSLHEPMYIFLCMLSGIDILISTSSMPKMLAIFWFNSTTIQFDACLLQMFAIHSLSGMESTVLLAMAFDRYVAICHPLRHATVLTLPRVTKIGVAAVVRGAALMAPLPVFIKQLPFCRSNILSHSYCLHQDVMKLACDDIRVNVVYGLIVIISAIGLDSLLISFSYLLILKTVLGLTREAQAKAFGTCVSHVCAVFIFYVPFIGLSMVHRFSKRRDSPLPVILANIYLLVPPVLNPIVYGVKTKEIRQRILRLFHVATHASEP

SEQ ID NO: 92 - DNA, 957 bp, Homo sapiens
atgatggtggatcccaatggcaatgaatccagtgctacatacttcatcctaataggcctccctggtttagaagaggctcagttctggttggccttcccattgtgctccctctaccttattgctgtgctaggtaacttgacaatcatctacattgtgcggactgagcacagcctgcatgagcccatgtatatatttctttgcatgctttcaggcattgacatcctcatctccacctcatccatgcccaaaatgctggccatcttctggttcaattccactaccatccagtttgatgcttgtctgctacagatgtttgccatccactccttatctggcatggaatccacagtgctgctggccatggcttttgaccgctatgtggccatctgtcacccactgcgccatgccacagtacttacgttgcctcgtgtcaccaaaattggtgtggctgctgtggtgcggggggctgcactgatggcaccccttcctgtcttcatcaagcagctgcccttctgccgctccaatatcctttcccattcctactgcctacaccaagatgtcatgaagctggcctgtgatgatatccgggtcaatgtcgtctatggccttatcgtcatcatctccgccattggcctggactcacttctcatctccttctcatatctgcttattcttaagactgtgttgggcttgacacgtgaagcccaggccaaggcatttggcacttgcgtctctcatgtgtgtgctgtgttcatattctatgtacctttcattggattgtccatggtgcatcgctttagcaagcggcgtgactctccgctgcccgtcatcttggccaatatctatctgctggttcctcctgtgctcaacccaattgtctatggagtgaagacaaaggagattcgacagcgcatccttcgacttttccatgtggccacacacgcttcagagccctag

SEQ ID NO: 93 - protein, 317 aa, Homo sapiens
MLTFHNVCSVPSSFWLTGIPGLESLHVWLSIPFGSMYLVAVVGNVTILAVVKIERSLHQPMYFFLCMLAAIDLVLSTSTIPKLLGIFWFGACDIGLDACLGQMFLIHCFATVESGIFLAMAFDRYVAICNPLRHSMVLTYTVVGRLGLVSLLRGVLYIGPLPLMIRLRLPLYKTHVISHSYCEHMAVVALTCGDSRVNNVYGLSIGFLVLILDSVAIAASYVMIFRAVMGLATPEARLKTLGTCASHLCAILIFYVPIAVSSLIHRFGQCVPPPVHTLLANFYLLIPPILNPIVYAVRTKQIRESLLQIPRIEMKIR

SEQ ID NO: 94 - DNA, 954 bp, Homo sapiens
atgctcacttttcataatgtctgctcagtacccagctccttctggctcactggcatcccagggctggagtccctacacgtctggctctccatcccctttggctccatgtacctggtggctgtggtggggaatgtgaccatcctggctgtggtaaagatagaacgcagcctgcaccagcccatgtactttttcttgtgcatgttggctgccattgacctggttctgtctacttccactatacccaaacttctgggaatcttctggttcggtgcttgtgacattggcctggacgcctgcttgggccaaatgttccttatccactgctttgccactgttgagtcaggcatcttccttgccatggcttttgatcgctacgtggccatctgcaacccactacgtcatagcatggtgctcacttatacagtggtgggtcgtttggggcttgtttctctcctccggggtgttctctacattggacctctgcctctgatgatccgcctgcggctgcccctttataaaacccatgttatctcccactcctactgtgagcacatggctgtagttgccttgacatgtggcgacagcagggtcaataatgtctatgggctgagcatcggctttctggtgttgatcctggactcagtggctattgctgcatcctatgtgatgattttcagggccgtgatggggttagccactcctgaggctaggcttaaaaccctggggacatgcgcttctcacctctgtgccatcctgatcttttatgttcccattgctgtttcttccctgattcaccgatttggtcagtgtgtgcctcctccagtccacactctgctggccaacttctatctcctcattcctccaatcctcaatcccattgtctatgctgttcgcaccaagcagatccgagagagccttctccaaataccaaggatagaaatgaagattagatga

SEQ ID NO: 95 - protein, 319 aa, Homo sapiens
MNLDSFFSFLLKSLIMALSNSSWRLPQPSFFLVGIPGLEESQHWIALPLGILYLLALVGNVTILFIIWMDPSLHQSMYLFLSMLAAIDLVVASSTAPKALAVLLVRAQEIGYTVCLIQMFFTHAFSSMESGVLVAMALDRYVAICHPLHHSTILHPGVIGHIGMVVLVRGLLLLIPFLILLRKLIFCQATIIGHAYCEHMAVVKLACSETTVNRAYGLTVALLVVGLDVLAIGVSYAHILQAVLKVPGNEARLKAFSTCGSHVCVILVFYIPGMFSFLTHRFGHHVPHHVHVLLAILYRLVPPALNPLVYRVKTQKIHQ

SEQ ID NO: 96 - DNA, 960 bp, Homo sapiens
atgaatttggattcttttttctctttcctcctcaagtcattgataatggcacttagcaattccagctggaggctaccccagccttcttttttcctggtaggaattccgggtttagaggaaagccagcactggatcgcactgcccctgggcatcctttacctccttgctctagtgggcaatgttaccattctcttcatcatctggatggacccatccttgcaccaatctatgtacctcttcctgtccatgctagctgccatcgacctggttgtggcctcctccactgcacccaaagcccttgcagtgctcctggttcgtgcccaagagattggttacactgtctgcctgatccagatgttcttcacccatgcattctcctccatggagtcaggggtacttgtggccatggctctggatcgctatgtagccatttgtcaccccttgcaccattccacaatcctgcatccaggggtcatagggcacatcggaatggtggtgctggtgcggggattactactcctcatccccttcctcattctgttgcgaaaacttatcttctgccaagccaccatcataggccatgcctattgtgaacatatggctgttgtgaaacttgcctgctcagaaaccacagtcaatcgagcttatgggctgactgtggccttgcttgtggttgggctggatgtcctggccattggtgtttcctatgcccacattctccaggcagtgctgaaggtaccaggaaatgaggcccgacttaaggcctttagcacatgtggctctcatgtttgtgtcatcctggtcttctatatcccgggaatgttctccttcctcactcaccgctttggtcatcatgtaccccatcacgtccatgttcttctggccatactgtatcgccttgtgccacctgcactcaatcctcttgtctatagggtgaagacccagaagatccaccagtga

SEQ ID NO: 97 - protein, 350 aa, Homo sapiens
MCQQILRDCILLIHHLCINRKKVSLVMLGPAYNHTMETPASFLLVGIPGLQSSHLWLAISLSAMYIIALLGNTIIVTAIWMDSTRHEPMYCFLCVLAAVDIVMASSVVPKMVSIFCSGDSSISFSACFTQMFFVHLATAVETGLLLTMAFDRYVAICKPLHYKRILTPQVMLGMSMAITIRAIIAITPLSWMVSHLPFCGSNVVVHSYCEHIALARLACADPVPSSLYSLIGSSLMVGSDVAFIAASYILILKAVFGLSSKTAQLKALSTCGSHVGVMALYYLPGMASIYAAWLGQDVVPLHTQVLLADLYVIIPATLNPIIYGMRTKQLRERIWSYLMHVLFDHSNLGS

SEQ ID NO: 98 - DNA, 1053 bp, Homo sapiens
atgtgtcaacaaatcttacgggattgcattcttctcatacatcatttgtgcattaacaggaaaaaagtctcacttgtgatgctgggtccagcttataaccacacaatggaaacccctgcctccttcctccttgtgggtatcccaggactgcaatcttcacatctttggctggctatctcactgagtgccatgtacatcatagccctgttaggaaacaccatcatcgtgactgcaatctggatggattccactcggcatgagcccatgtattgctttctgtgtgttctggctgctgtggacattgttatggcctcctcggtggtacccaagatggtgagcatcttctgctcaggagacagctcaatcagctttagtgcttgtttcactcagatgttttttgtccacttagccacagctgtggagacggggctgctgctgaccatggcttttgaccgctatgtagccatctgcaagcctctacactacaagagaattctcacgcctcaagtgatgctgggaatgagtatggccatcaccatcagagctatcatagccataactccactgagttggatggtgagtcatctacctttctgtggctccaatgtggttgtccactcctactgtgagcacatagctttggccaggttagcatgtgctgaccccgtgcccagcagtctctacagtctgattggttcctctcttatggtgggctctgatgtggccttcattgctgcctcctatatcttaattctcaaggcagtatttggtctctcctcaaagactgctcagttgaaagcattaagcacatgtggctcccatgtgggggttatggctttgtactatctacctgggatggcatccatctatgcggcctggttggggcaggatgtagtgcccttgcacacccaagtcctgctagctgacctgtacgtgatcatcccagccaccttaaatcccatcatctatggcatgaggaccaaacaactgcgggagagaatatggagttatctgatgcatgtcctctttgaccattccaacctgggttcatga

SEQ ID NO: 99 - protein, 324 aa, Homo sapiens
MLGPAYNHTMETPASFLLVGIPGLQSSHLWLAISLSAMYITALLGNTLIVTAIWMDSTRHEPMYCFLCVLAAVDIVMASSVVPKMVSIFCSGDSSISFSACFTQMFFVHLATAVETGLLLTMAFDRYVAICKPLHYKRILTPQVMLGMSMAVTIRAVTFMTPLSWMMNHLPFCGSNVVVHSYCKHIALARLACADPVPSSLYSLIGSSLMVGSDVAFIAASYILILRAVFDLSSKTAQLKALSTCGSHVGVMALYYLPGMASIYAAWLGQDIVPLHTQVLLADLYVIIPATLNPIIYGMRTKQLLEGIWSYLMHFLFDHSNLGS

SEQ ID NO: 100 - DNA, 975 bp, Homo sapiens
atgctgggtccagcttacaaccacacaatggaaacccctgcctccttcctccttgtgggtatcccaggactgcaatcttcacatctttggctggctatctcactgagtgccatgtacatcacagccctgttaggaaacaccctcatcgtgactgcaatctggatggattccactcggcatgagcccatgtattgctttctgtgtgttctggctgctgtggacattgttatggcctcctccgtggtacccaagatggtgagcatcttctgctcgggagacagctccatcagctttagtgcttgtttcactcagatgttttttgtccacttagccacagctgtggagacggggctgctgctgaccatggcttttgaccgctatgtagccatctgcaagcctctacactacaagagaattctcacgcctcaagtgatgctgggaatgagtatggccgtcaccatcagagctgtcacattcatgactccactgagttggatgatgaatcatctacctttctgtggctccaatgtggttgtccactcctactgtaagcacatagctttggccaggttagcatgtgctgaccccgtgcccagcagtctctacagtctgattggttcctctcttatggtgggctctgatgtggccttcattgctgcctcctatatcttaattctcagggcagtatttgatctctcctcaaagactgctcagttgaaagcattaagcacatgtggctcccatgtgggggttatggctttgtactatctacctgggatggcatccatctatgcggcctggttggggcaggatatagtgcccttgcacacccaagtgctgctagctgacctgtacgtgatcatcccagccactttaaatcccatcatctatggcatgaggaccaaacaattgctggagggaatatggagttatctgatgcacttcctctttgaccactccaacctgggttcatga

SEQ ID NO: 101 - protein, 318 aa, Homo sapiens
MSDSNLSDNHLPDTFFLTGIPGLEAAHFWIAIPFCAMYLVALVGNAALILVIAMDNALHAPMYLFLCLLSLTDLALSSTTVPKMLAILWLHAGEISFGGCLAQMFCVHSIYALESSILLAMAFDRYVAICNPLRYTTILNHAVIGRIGFVGLFRSVAIVSPFIFLLRRLPYCGHRVMTHTYCEHMGIARLACANITVNIVYGLTVALLAMGLDSILIAISYGFILHAVFHLPSHDAQHKALSTCGSHIGIILVFYIPAFFSFLTHRFGHHEVPKHVHIFLANLYVLVPPVLNPILYGARTKEIRSRLLKLLHLGKTSI

SEQ ID NO: 102 - DNA, 957 bp, Homo sapiens
atgtcagattccaacctcagtgataaccatcttccagacaccttcttcttaacagggatcccagggctggaggctgcccacttctggattgccatccctttctgtgccatgtatcttgtagcactggttggaaatgctgccctcatcctggtcattgccatggacaatgctcttcatgcacctatgtacctcttcctctgccttctctcactcacagacctggctctcagttctaccactgtgcccaagatgctggccattttgtggctccatgctggtgagatttcctttggtggatgcctggcccagatgttttgtgtccattctatctatgctctggagtcctcgattctacttgccatggcctttgataggtatgtggctatctgtaacccattaaggtatacaaccattctcaaccatgctgtcataggcagaattggctttgttgggctattccgtagtgtggctattgtctcccccttcatcttcttgctgaggcgactcccctactgtggtcaccgtgtcatgacacacacatactgtgagcatatgggcatcgcccgactggcctgtgccaacatcactgtcaatattgtctatgggctaactgtggctctgctggccatgggactggattccattctcattgccatttcctatggctttatcctccatgcagtctttcaccttccatctcatgatgcccagcacaaagctctgagtacctgtggctcccacattggcatcatcctggttttctacatccctgccttcttctccttcctcacccaccgctttggtcaccacgaagtccccaagcatgtgcacatctttctggctaatctctatgtgctggtgcctcctgtactcaatcctattctctatggagctagaaccaaggagattcggagtcgacttctaaaactgcttcacctggggaagacttcaatatga

SEQ ID NO: 103 - protein, 326 aa, Homo sapiens
MSFQVTYMFYLHWTMEKSNNSTLFILLGFSQNKNIEVLCFVLFLFCYIAIWMGNLLIMISITCTQLIHQPMYFFLNYLSLSDLCYTSTVTPKLMVDLLAERKTISYNNCMIQLFTTHFFGGIEIFILTGMAYDRYVAICKPLHYTIIMSRQKCNTIIIVCCTGGFIHSASQFLLTIFVPFCGPNEIDHYFCDVYPLLKLACSNIHMIGLLVIANSGLIALVTFVVLLLSYVFILYTIRAYSAERRSKALATCSSHVIVVVLFFAPALFIYIRPVTTFSEDKVFALFYTIIAPMFNPLIYTLRNTEMKNAMRKVWCCQILLKRNQLF

SEQ ID NO: 104 - DNA, 981 bp, Homo sapiens
atgtcatttcaggtgacttatatgttctatctacactggaccatggaaaaaagcaataatagcactttgtttattctcttggggttttcccaaaataagaacattgaagtcctctgctttgtattatttttgttttgctacattgctatttggatgggaaacttactcataatgatttctatcacgtgcacccagctcattcaccaacccatgtatttcttcctcaattacctctcactctccgacctttgctacacatccacagtgacccccaaattaatggttgacttactggcagaaagaaagaccatttcctataataactgtatgatacaactctttaccacccatttttttggaggcatagagatcttcattctcacagggatggcctatgaccgctatgtggccatttgcaagcccctgcactacaccattattatgagcaggcaaaagtgtaacacaatcatcatagtttgttgtactgggggatttatacattctgccagtcagtttcttctcaccatctttgtaccattttgtggcccaaatgagatagatcactacttctgtgatgtgtatcctttgctgaaattggcctgttctaatatacacatgataggtctcttagtcattgctaattcaggcttaattgctttggtgacatttgttgtcttgttgttgtcttatgtttttatattgtataccatcagagcatactctgcagagagacgcagcaaagctcttgccacttgtagttctcatgtaattgttgtggtcctgttttttgctcctgcattgttcatttacattagaccggtcacaacattctcagaagataaagtgtttgcccttttttataccatcattgctcccatgttcaaccctctcatatacacgctgagaaacacagagatgaagaacgccatgaggaaagtgtggtgttgtcaaatactcctgaaaagaaatcaacttttctga

SEQ ID NO: 105 - protein, 370 aa, Homo sapiens
MFSMTTEALNNFALGCTNLLMTMIPQIDLKQIFLCPNCRLYMIPVGAFIFSLGNMQNQSFVTEFVLLGLSQNPNVQEIVFVVFLFVYIATVGGNMLIVVTILSSPALLVSPMYFFLGFLSFLDACFSSVITPKMIVDSLYVTKTISFEGCMMQLFAEHFFAGVEVIVLTAMAYDRYVAICKPLHYSSIMNRRLCGILMGVAWTGGLLHSMIQILFTFQLPFCGPNVINHFMCDLYPLLELACTDTHIFGLMVVINSGFICIINFSLLLVSYAVILLSLRTHSSEGRWKALSTCGSHIAVVILFFVPCIFVYTRPPSAFSLDKMAAIFYIILNPLLNPLIYTFRNKEVKQAMRRIWNRLMVVSDEKENIKL

SEQ ID NO: 106 - DNA, 1113 bp, Homo sapiens
atgttctcaatgacaacagaagcactcaataattttgcacttggatgtaccaacttgttaatgactatgataccacaaattgatctgaagcaaattttcctttgtcctaattgcagactatacatgatccctgttggagctttcatcttttccttgggaaacatgcaaaaccaaagctttgtaactgagtttgtcctcctgggactttcacagaatccaaatgttcaggaaatagtatttgttgtatttttgtttgtctacattgcaactgttgggggcaacatgctaattgtagtaaccattctcagcagccctgctcttctggtgtctcctatgtacttcttcttgggcttcctgtccttcctggatgcgtgcttctcatctgtcatcaccccaaagatgattgtagactccctctatgtgacaaaaaccatctcttttgaaggctgcatgatgcagctctttgctgaacacttctttgctggggtggaggtgattgtcctcacagccatggcctatgatcgttatgtggccatttgcaagcccttgcattactcttctatcatgaacaggaggctctgtggcattctgatgggggtagcctggacagggggcctcttgcattccatgatacaaattctttttactttccagcttcccttttgtggccccaatgtcatcaatcactttatgtgtgacttgtacccgttactggagcttgcctgcactgatactcacatctttggcctcatggtggtcatcaacagtgggtttatctgcatcataaacttctccttgttgcttgtctcctatgctgtcatcttgctctctctgagaacacacagttctgaagggcgctggaaagctctctccacctgtggatctcacattgctgttgtgattttgttctttgtcccatgcatatttgtatatacacgacctccatctgctttttcccttgacaaaatggcggcaatattttatatcatcttaaatcccttgctcaatcctttgatttacactttcaggaataaggaagtaaaacaggccatgaggagaatatggaacagactgatggtggtttctgatgagaaagaaaatattaaactttaa

SEQ ID NO: 107 - protein, 315 aa, Homo sapiens
MGDWNNSDAVEPIFILRGFPGLEYVHSWLSILFCLAYLVAFMGNVTILSVIWIESSLHQPMYYFISILAVNDLGMSLSTLPTMLAVLWLDAPEIQASACYAQLFFIHTFTFLESSVLLAMAFDRFVAICHPLHYPTILTNSVIGKIGLACLLRSLGVVLPTPLLLRHYHYCHGNALSHAFCLHQDVLRLSCTDARTNSIYGLCVVIATLGVDSIFILLSYVLILNTVLDIASREEQLKALNTCVSHICVVLIFFVPVIGVSMVHRFGKHLSPIVHILMADIYLLLPPVLNPIVYSVRTKQIRLGILHKFVLRRRF

SEQ ID NO: 108 - DNA, 948 bp, Homo sapiens
atgggagactggaataacagtgatgctgtggagcccatatttatcctgaggggttttcctggactggagtatgttcattcttggctctccatcctcttctgtcttgcatatttggtagcatttatgggtaatgttaccatcctgtctgtcatttggatagaatcctctctccatcagcccatgtattactttatttccatcttagcagtgaatgacctggggatgtccctgtctacacttcccaccatgcttgctgtgttatggttggatgctccagagatccaggcaagtgcttgctatgctcagctgttcttcatccacacattcacattcctggagtcctcagtgttgctggccatggcctttgaccgttttgttgctatctgccatccactgcactaccccaccatcctcaccaacagtgtaattggcaaaattggtttggcctgtttgctacgaagcttgggagttgtacttcccacacctttgctactgagacactatcactactgccatggcaatgccctctctcacgccttctgtttgcaccaggatgttctaagattatcctgtacagatgccaggaccaacagtatttatgggctttgtgtagtcattgccacactaggtgtggattcaatcttcatacttctttcttatgttctgattcttaatactgtgctggatattgcatctcgtgaagagcagctaaaggcactcaacacatgtgtatcccatatctgtgtggtgcttatcttctttgtgccagttattggggtgtcaatggtccatcgctttgggaagcatctgtctcccatagtccacatcctcatggcagacatctaccttcttcttcccccagtccttaaccctattgtctatagtgtcagaacaaagcagattcgtctaggaattctccacaagtttgtcctaaggaggaggttttaa

SEQ ID NO: 109 - protein, 325 aa, Homo sapiens
MFLPNDTQFHPSSFLLLGIPGLETLHIWIGFPFCAVYMIALIGNFTILLVIKTDSSLHQPMFYFLAMLATTDVGLSTATIPKMLGIFWINLRGIIFEACLTQMFFIHNFTLMESAVLVAMAYDSYVAICNPLQYSAILTNKVVSVIGLGVFVRALIFVIPSILLILRLPFCGNHVIPHTYCEHMGLAHLSCASIKINIIYGLCAICNLVFDITVIALSYVHILCAVFRLPTHEPRLKSLSTCGSHVCVILAFYTPALFSFMTHCFGRNVPRYIHILLANLYVVVPPMLNPVIYGVRTKQIYKCVKKILLQEQGMEKEEYLIHTRF

SEQ ID NO: 110 - DNA, 978 bp, Homo sapiens
atgttccttcccaatgacacccagtttcacccctcctccttcctgttgctggggatcccaggactagaaacacttcacatctggatcggctttcccttctgtgctgtgtacatgatcgcactcatagggaacttcactattctacttgtgatcaagactgacagcagcctacaccagcccatgttctacttcctggccatgttggccaccactgatgtgggtctctcaacagctaccatccctaagatgcttggaatcttctggatcaacctcagagggatcatctttgaagcctgcctcacccagatgttttttatccacaacttcacacttatggagtcagcagtccttgtggcaatggcttatgacagctatgtggccatctgcaatccactccaatatagcgccatcctcaccaacaaggttgtttctgtgattggtcttggtgtgtttgtgagggctttaattttcgtcattccctctatacttcttatattgcggttgcccttctgtgggaatcatgtaattccccacacctactgtgagcacatgggtcttgctcatctatcttgtgccagcatcaaaatcaatattatttatggtttatgtgccatttgtaatctggtgtttgacatcacagtcattgccctctcttatgtgcatattctttgtgctgttttccgtcttcctactcatgagccccgactcaagtccctcagcacatgtggttcacatgtgtgtgtaatccttgccttctatacaccagccctcttttcctttatgactcattgctttggccgaaatgtgccccgctatatccatatactcctagccaatctctatgttgtggtgccaccaatgctcaatcctgtcatatatggagtcagaaccaagcagatctataaatgtgtaaagaaaatattattgcaggaacaaggaatggaaaaggaagagtacctaatacatacgaggttctga

SEQ ID NO: 111 - protein, 313 aa, Homo sapiens
MSIINTSYVEITTFFLVGMPGLEYAHIWISIPICSMYLIAILGNGTILFIIKTEPSLHGPMYYFLSMLAMSDLGLSLSSLPTVLSIFLFNAPETSSSACFAQEFFIHGFSVLESSVLLIMSFDRFLAIHNPLRYTSILTTVRVAQIGIVFSFKSMLLVLPFPFTLRSLRYCKKNQLSHSYCLHQDVMKLACSDNRIDVIYGFFGALCLMVDFILIAVSYTLILKTVPGIASKKEELKALNTCVSHICAVIIFYLPIINLAVVHRFAGHVSPLINVLMANVLLLVPPLMKPIVYCVKTKQIRVRVVAKLCQWKI

SEQ ID NO: 112 - DNA, 942 bp, Homo sapiens
atgtccattatcaacacatcatatgttgaaatcaccaccttcttcttggttgggatgccagggctagaatatgcacacatctggatctctatccccatctgcagcatgtatcttattgctattctaggaaatggcaccattctttttatcatcaagacagagccctccttgcatgggcccatgtactattttctttccatgttggctatgtcagacttgggtttgtctttatcatctctgcccactgtgttaagcatcttcctgttcaatgcccctgaaacttcttctagtgcctgctttgcccaggaattcttcattcatggattctcagtactggagtcctcagtcctcctgatcatgtcatttgatagattcctagccatccacaatcctctgagatacacctcaatcctgacaactgtcagagttgcccaaatagggatagtattctcctttaagagcatgctcctggttcttcccttccctttcactttaagaagcttgagatattgcaagaaaaaccaattatcccattcctactgtctccaccaggatgtcatgaagttggcctgttctgacaacagaattgatgttatctatggcttttttggagcactctgccttatggtagactttattctcattgctgtgtcttacaccctgatcctcaagactgtaccgggaattgcatccaaaaaggaggagcttaaggctctcaatacttgtgtttcacacatctgtgcagtgatcatcttctacctgcccatcatcaacctggccgttgtccaccgctttgccgggcatgtctctcccctcattaatgttctcatggcaaatgttctcctacttgtacctccgctgatgaaaccaattgtttattgtgtaaaaactaaacagattagagtgagagttgtagcaaaattgtgtcaatggaagatttaa

SEQ ID NO: 113 - protein, 311 aa, Homo sapiens
MFYHNKSIFHPVTFFLIGIPGLEDFHMWISGPFCSVYLVALLGNATILLVIKVEQTLREPMFYFLAILSTIDLALSATSVPRMLGIFWFDAHEINYGACVAQMFLIHAFTGMEAEVLLAMAFDRYVAICAPLHYATILTSLVLVGISMCIVIRPVLLTLPMVYLIYRLPFCQAHIIAHSYCEHMGIAKLSCGNIRINGIYGLFVVSFFVLNLVLIGISYVYILRAVFRLPSHDAQLKALSTCGAHVGVICVFYIPSVFSFLTHRFGHQIPGYIHILVANLYLIIPPSLNPIIYGVRTKQIRERVLYVFTKK

SEQ ID NO: 114 - DNA, 936 bp, Homo sapiens
atgttttatcacaacaagagcatatttcacccagtcacatttttcctcattggaatcccaggtctggaagacttccacatgtggatctccgggcctttctgctctgtttaccttgtggctttgctgggcaatgccaccattctgctagtcatcaaggtagaacagactctccgggagcccatgttctacttcctggccattctttccactattgatttggccctttctgcaacctctgtgcctcgcatgctgggtatcttctggtttgatgctcacgagattaactatggagcttgtgtggcccagatgtttctgatccatgccttcactggcatggaggctgaggtcttactggctatggcttttgaccgttatgtggccatctgtgctccactacattacgcaaccatcttgacatccctagtgttggtgggcattagcatgtgcattgtaattcgtcccgttttacttacacttcccatggtctatcttatctaccgcctacccttttgtcaggctcacataatagcccattcctactgtgagcacatgggcattgcaaaattgtcctgtggaaacattcgtatcaatggtatctatgggctttttgtagtttctttctttgttctgaacctggtgctcattggcatctcgtatgtttacattctccgtgctgtcttccgcctcccatcacatgatgctcagctaaaagccctaagcacgtgtggcgctcatgttggagtcatctgtgttttctatatcccttcagtcttctctttccttactcatcgatttggacaccaaataccaggttacattcacattcttgttgccaatctctatttgattatcccaccctctctcaaccccatcatttatggggtgaggaccaaacagattcgagagcgagtgctctatgtttttactaaaaaataa

SEQ ID NO: 115 - protein, 313 aa, Homo sapiens
MSIINTSYVEITTFFLVGMPGLEYAHIWISIPICSMYLIAILGNGTILFIIKTEPSLHEPMYYFLSMLAMSDLGLSLSSLPTVLSIFLFNAPEISSNACFAQEFFIHGFSVLESSVLLIMSFDRFLAIHNPLRYTSILTTVRVAQIGIVFSFKSMLLVLPFPFTLRNLRYCKKNQLSHSYCLHQDVMKLACSDNRIDVIYGFFGALCLMVDFILIAVSYTLILKTVLGIASKKEQLKALNTCVSHICAVIIFYLPIINLAVVHRFARHVSPLINVLMANVLLLVPPLTNPIVYCVKTKQIRVRVVAKLCQRKI

SEQ ID NO: 116 - DNA, 942 bp, Homo sapiens
atgtccattatcaacacatcatatgttgaaatcaccaccttcttcttggttgggatgccagggctagaatatgcacacatctggatctctatccccatctgcagcatgtatcttattgctattctaggaaatggcaccattctttttatcatcaagacagagccctccttgcatgagcccatgtactattttctttccatgttggctatgtcagacttgggtttgtctttatcatctctgcccactgtgttaagcatcttcctgttcaatgctcctgaaatttcatccaatgcctgctttgcccaggaattcttcattcatggattctcagtactggagtcctcagtcctcctgatcatgtcatttgatagattcctagccatccacaaccctctgagatacacctcaatcctgacaactgtcagagttgcccaaatagggatagtattctcctttaagagcatgctcctggttcttcccttccctttcactttaagaaacttgagatattgcaagaaaaaccaattatcccattcctactgtctccaccaggatgtcatgaagttggcctgttctgacaacagaattgatgttatctatggcttttttggagcactctgccttatggtagactttattctcattgctgtgtcttacaccctgatcctcaagactgtactgggaattgcatccaaaaaggagcagcttaaggctctcaatacttgtgtttcacacatctgtgcagtgatcatcttctacctgcccatcatcaacctggccgttgtccaccgctttgcccggcatgtctctcccctcattaatgttctcatggcaaatgttctcctacttgtacctccactgacgaacccaattgtttattgtgtaaaaactaaacagattagagtgagagttgtagcaaaattgtgtcaacggaagatttaa

SEQ ID NO: 117 - protein, 321 aa, Homo sapiens
MTILLNSSLQRATFFLTGFQGLEGLHGWISIPFCFIYLTVILGNLTILHVICTDATLHGPMYYFLGMLAVTDLGLCLSTLPTVLGIFWFDTREIGIPACFTQLFFIHTLSSMESSVLLSMSIDRSVAVCNPLHDSTVLTPACIVKMGLSSVLRSALLILPLPFLLKRFQYCHSHVLAHAYCLHLEIMKLACSSIIVNHIYGLFVVACTVGVDSLLIFLSYALILRTVLSIASHQERLRALNTCVSHICAVLLFYIPMIGLSLVHRFGEHLPRVVHLFMSYVYLLVPPLMNPIIYSIKTKQIRQRIIKKFQFIKSLRCFWKD

SEQ ID NO: 118 - DNA, 966 bp, Homo sapiens
atgacaattcttcttaatagcagcctccaaagagccactttcttcctgacgggcttccaaggtctagaaggtctccatggctggatctctattcccttctgcttcatctacctgacagttatcttggggaacctcaccattctccacgtcatttgtactgatgccactctccatggacccatgtactatttcttgggcatgctagctgtcacagacttaggcctttgcctttccacactgcccactgtgctgggcattttctggtttgataccagagagattggcatccctgcctgtttcactcagctcttcttcatccacaccttgtcttcaatggagtcatcagttctgttatccatgtccattgaccgctccgtggccgtctgcaacccactgcatgactccaccgtcctgacacctgcatgtattgtcaagatggggctaagctcagtgcttagaagtgctctcctcatcctccccttgccattcctcctgaagcgcttccaatactgccactcccatgtgctggctcatgcttattgtcttcacctggagatcatgaagctggcctgctctagcatcattgtcaatcacatctatgggctctttgttgtggcctgcaccgtgggtgtggactccctgctcatctttctctcatacgccctcatccttcgcaccgtgctcagcattgcctcccaccaggagcgactccgagccctcaacacctgtgtctctcatatctgtgctgtactgctcttctacatccccatgattggcttgtctcttgtgcatcgctttggtgaacatctgccccgcgttgtacacctcttcatgtcctatgtgtatctgctggtaccaccccttatgaaccccatcatctacagcatcaagaccaagcaaattcgccagcgcatcattaagaagtttcagtttataaagtcacttaggtgtttttggaaggattaa

SEQ ID NO: 119 - protein, 317 aa, Homo sapiens
MAGRMSTSNHTQFHPSSFLLLGIPGLEDVHIWIGVPFFFVYLVALLGNTALLFVIQTEQSLHEPMYYFLAMLDSIDLGLSTATIPKMLGIFWFNTKEISFGGCLSHMFFIHFFTAMESIVLVAMAFDRYIAICKPLRYTMILTSKIISLIAGIAVLRSLYMVVPLVFLLLRLPFCGHRIIPHTYCEHMGIARLACASIKVNIRFGLGNISLLLLDVILIILSYVRILYAVFCLPSWEARLKALNTCGSHIGVILAFFTPAFFSFLTHRFGHNIPQYIHIILANLYVVVPPALNPVIYGVRTKQIRERVLRIFLKTNH

SEQ ID NO: 120 - DNA, 954 bp, Homo sapiens
atggcaggaagaatgtctacgtctaatcacacccagttccatccttcttcattcctactgctgggtatcccagggctagaagatgtgcacatttggattggagtcccttttttctttgtgtatcttgttgcactcctgggaaacactgctctcttgtttgtgatccagactgagcagagtctccatgagcctatgtactacttcctggccatgttggattccattgacctgggcttgtctacagccaccatccccaaaatgttgggcatcttctggttcaataccaaagaaatatcttttggaggctgcctttctcacatgttcttcatccatttcttcactgctatggagagcattgtgttggtggccatggcctttgaccgctacattgccatttgcaaacctcttcggtacaccatgatcctcaccagcaaaatcatcagcctcattgcaggcattgctgtcctgaggagcctgtacatggttgttccactggtgtttctccttctgaggctgcccttctgtgggcatcgtatcatccctcatacttattgtgagcacatgggcattgcccgtctggcctgtgccagcatcaaagtcaacattaggtttggccttggcaacatatctctcttgttactggatgttatccttattattctctcctatgtcaggatcctgtatgctgtcttctgcctgccctcctgggaagctcgactcaaagctctcaacacctgtggttctcatattggtgttatcttagccttttttacaccagcatttttttcattcttgacacatcgttttggccataatatcccacagtatatacatattatattagccaacctgtatgtggttgtcccaccagccctcaatcctgtaatctatggagtcaggacaaagcagattcgagagagagtgctgaggatttttctcaagaccaatcactaa

SEQ ID NO: 121 - protein, 320 aa, Homo sapiens
MSFLNGTSLTPASFILNGIPGLEDVHLWISFPLCTMYSIAITGNFGLMYLIYCDEALHRPMYVFLALLSFTDVLMCTSTLPNTLFILWFNLKEIDFKACLAQMFFVHTFTGMESGVLMLMALDHCVAICFPLRYATILTNSVIAKAGFLTFLRGVMLVIPSTFLTKRLPYCKGNVIPHTYCDHMSVAKISCGNVRVNAIYGLIVALLIGGFDILCITISYTMILQAVVSLSSADARQKAFSTCTAHFCAIVLTYVPAFFTFFTHHFGGHTIPLHIHIIMANLYLLMPPTMNPIVYGVKTRQVRESVIRFFLKGKDNSHNF

SEQ ID NO: 122 - DNA, 963 bp, Homo sapiens
atgtcatttctaaatggcaccagcctaactccagcttcattcatcctaaatggcatccctggtttggaagatgtgcatttgtggatctccttcccactgtgtaccatgtacagcattgctattacagggaacttcggccttatgtacctcatctactgtgatgaggccttacacagacctatgtatgtcttccttgcccttctttccttcacagatgtgctcatgtgcaccagcacccttcccaacactctcttcatattgtggtttaatctcaaggagattgattttaaagcctgcctcgcccagatgttctttgtgcacaccttcacagggatggagtctggggtgctcatgctcatggccctggaccactgtgtggccatctgcttccctctgcgttatgccaccatcctcactaattcagtcattgctaaagctgggttcctcacttttcttaggggtgtgatgcttgttatcccttccactttcctcaccaagcgccttccatactgcaagggcaacgtcataccccacacctactgtgaccacatgtctgtggccaagatatcttgtggtaatgtcagggttaacgccatctatggtttgatagttgccctgctgattgggggctttgatatcctgtgcattacaatctcctacactatgattcttcaagcagttgtgagtctatcatcagcagatgctcgacagaaggccttcagcacctgcactgcccacttctgtgccatagtcctcacctatgttccagccttctttaccttctttacacaccattttgggggacacaccattcctctacacatacatattattatggctaatctctacctactaatgcctcccacaatgaaccctattgtgtatggggtgaaaaccaggcaggtacgagaaagtgtcattaggttctttcttaagggaaaggacaattctcataacttttaa

SEQ ID NO: 123 - protein, 321 aa, Homo sapiens
MSGDNSSSLTPGFFILNGVPGLEATHIWISLPFCFMYIIAVVGNCGLICLISHEEALHRPMYYFLALLSFTDVTLCTTMVPNMLCIFWFNLKEIDFNACLAQMFFVHMLTGMESGVLMLMALDRYVAICYPLRYATILTNPVIAKAGLATFLRNVMLIIPFTLLTKRLPYCRGNFIPHTYCDHMSVAKVSCGNFKVNAIYGLMVALLIGVFDICCISVSYTMILQAVMSLSSADARHKAFSTCTSHMCSIVITYVAAFFTFFTHRFVGHNIPNHIHIIVANLYLLLPPTMNPIVYGVKTKQIQEGVIKFLLGDKVSFTYDK

SEQ ID NO: 124 - DNA, 966 bp, Homo sapiens
atgtctggggacaacagctccagcctgaccccaggattctttatcttgaatggcgttcctgggctggaagccacacacatctggatctccctgccattctgctttatgtacatcattgctgtcgtggggaactgtgggctcatctgcctcatcagccatgaggaggccctgcaccggcccatgtactacttcctggccctgctctccttcactgatgtcaccttgtgcaccaccatggtacctaatatgctgtgcatattctggttcaacctcaaggagattgactttaacgcctgcctggcccagatgttttttgtccatatgctgacagggatggagtctggggtgctcatgctcatggccctggaccgctatgtggccatctgctaccccttacgctatgccaccatccttaccaaccctgtcatcgccaaggctggtcttgccaccttcttgaggaatgtgatgctcatcatcccattcactctcctcaccaagcgcctgccctattgccgggggaacttcatcccccacacctactgtgaccatatgtctgtggccaaggtatcctgtggcaatttcaaggtcaatgctatttatggtctgatggttgctctcctgattggtgtgtttgatatctgctgtatctctgtatcttacactatgattttgcaggctgttatgagcctgtcatcagcagatgctcgtcacaaagccttcagcacctgcacatctcacatgtgttccattgtgatcacctatgttgctgcttttttcacttttttcactcatcgttttgtaggacacaatatcccaaaccacatacacatcatcgtggccaacctttatctgctactgcctcctaccatgaacccaattgtttatggagtcaagaccaagcagattcaggaaggtgtaattaaatttttacttggagacaaggttagttttacctatgacaaatga

SEQ ID NO: 125 - protein, 315 aa, Homo sapiens
MTTHRNDTLSTEASDFLLNCFVRSPSWQHWLSLPLSLLFLLAVGANTTLLMTIWLEASLHQPLYYLLSLLSLLDIVLCLTVIPKVLTIFWFDLRPISFPACFLQMYIMNCFLAMESCTFMVMAYDRYVAICHPLRYPSIITDHFVVKAAMFILTRNVLMTLPIPILSAQLRYCGRNVIENCICANMSVSRLSCDDVTINHLYQFAGGWTLLGSDLILIFLSYTFILRAVLRLKAEGAVAKALSTCGSHFMLILFFSTILLVFVLTHVAKKKVSPDVPVLLNVLHHVIPAALNPIIYGVRTQEIKQGMQRLLKKGC

SEQ ID NO: 126 - DNA, 948 bp, Homo sapiens
atgacaacacaccgaaatgacaccctctccactgaagcttcagacttcctcttgaattgttttgtcagatcccccagctggcagcactggctgtccctgcccctcagcctccttttcctcttggccgtaggggccaacaccaccctcctgatgaccatctggctggaggcctctctgcaccagcccctgtactacctgctcagcctcctctccctgctggacatcgtgctctgcctcactgtcatccccaaggtcctgaccatcttctggtttgacctcaggcccatcagcttccctgcctgcttcctccagatgtacatcatgaattgtttcctagccatggagtcttgcacattcatggtcatggcctatgatcgttatgtagccatctgccacccactgagatatccatcaatcatcactgatcactttgtagtcaaggctgccatgtttattttgaccagaaatgtgcttatgactctgcccatccccatcctttcagcacaactccgttattgtggaagaaatgtcattgagaactgcatctgtgccaatatgtctgtttccagactctcctgcgatgatgtcaccatcaatcacctttaccaatttgctggaggctggactctgctaggatctgacctcatccttatcttcctctcctacaccttcattctgcgagctgtgctgagactcaaggcagagggtgccgtggcaaaggccctaagcacatgtggctcccacttcatgctcatcctcttcttcagcaccatccttctggtttttgtcctcacacatgtggctaagaagaaagtctcccctgatgtgccagtcttgctcaatgttctccaccatgtcattcctgcagcccttaaccccatcatttacggggtgagaacccaagaaattaagcagggaatgcagaggttgttgaagaaagggtgctaa

SEQ ID NO: 127 - protein, 359 aa, Homo sapiens
MSYSIYKSTVNIPLSHGVVHSFCHNMNCNFMHIFKFVLDFNMKNVTEVTLFVLKGFTDNLELQTIFFFLFLAIYLFTLMGNLGLILVVIRDSQLHKPMYYFLSMLSSVDACYSSVITPNMLVDFTTKNKVISFLGCVAQVFLACSFGTTECFLLAAMAYDRYVAIYNPLLYSVSMSPRVYMPLINASYVAGILHATIHTVATFSLSFCGANEIRRVFCDIPPLLAISYSDTHTNQLLLFYFVGSIELVTILIVLISYGLILLAILKMYSAEGRRKVFSTCGAHLTGVSIYYGTILFMYVRPSSSYASDHDMIVSIFYTIVIPLLNPVIYSLRNKDVKDSMKKMFGKNQVINKVYFHTKK

SEQ ID NO: 128 - DNA, 1080 bp, Homo sapiens
atgtcgtacagtatatacaagagcacagttaacatccccttgagtcatggtgttgttcattctttttgtcataatatgaactgtaactttatgcatatcttcaagtttgttctagatttcaacatgaagaatgtcactgaagttaccttatttgtactgaagggcttcacagacaatcttgaactgcagactatcttcttcttcctgtttctagcaatctacctcttcactctcatgggaaatttaggactgattttagtggtcattagggattcccagctccacaaacccatgtactattttctgagtatgttgtcttctgtggatgcctgctattcctcagttattaccccaaatatgttagtagattttacgacaaagaataaagtcatttcattccttggatgtgtagcacaggtgtttcttgcttgtagttttggaaccacagaatgctttctcttggctgcaatggcttatgatcgctatgtagccatctacaaccctctcctgtattcagtgagcatgtcacccagagtctacatgccactcatcaatgcttcctatgttgctggcattttacatgctactatacatacagtggctacatttagcctatccttctgtggagccaatgaaattaggcgtgtcttttgtgatatccctcctctccttgctatttcttattctgacactcacacaaaccagcttctactcttctactttgtgggctctatcgagctggtcactatcctgattgttctgatctcctatggtttgattctgttggccattctgaagatgtattctgctgaagggaggagaaaagtcttctccacatgtggagctcacctaactggagtgtcaatttattatgggacaatcctcttcatgtatgtgagaccaagttccagctatgcttcggaccatgacatgatagtgtcaatattttacaccattgtgattcccttgctgaatcccgtcatctacagtttgaggaacaaagatgtaaaagactcaatgaaaaaaatgtttgggaaaaatcaggttatcaataaagtatattttcatactaaaaaataa

SEQ ID NO: 129 - protein, 404 aa, Homo sapiens
MDSTFTGYNLYNLQVKTEMDKLSSGLDIYRNPLKNKTEVTMFILTGFTDDFELQVFLFLLFFAIYLFTLIGNLGLVVLVIEDSWLHNPMYYFLSVLSFLDACYSTVVTPKMLVNFLAKNKSISFIGCATMDSTFTGYNLYNLQVKTEMDKLSSGLDIYRNPLKNKTEVTMFILTGFTDDFELQVFLFLLFFAIQMLLFVTFGTTECFLLAAMAYDHYVAIYNPLLYSVSMSPRVYVPLITASYVAGILHATIHIVATFSLSFCGSNEIRHVFCDMPPLLAISCSDTHTNQLLLFYFVGSIEIVTILIVLISCDFILLSILKMHSAKGRQKAFSTCGSHLTGVTIYHGTILVSYMRPSSSYASDHDIIVSIFYTIVIPKLNPIIYSLRNKEVKKAVKKMLKLVYK

SEQ ID NO: 130 - DNA, 1023 bp, Homo sapiens
atggactccactttcacaggctataacctttataacctgcaagtaaaaactgaaatggacaagttgtcatcaggtttggatatatacaggaatccactgaagaacaagactgaagtcaccatgtttatattgacaggcttcacagatgattttgagctgcaagtcttcctatttttactattttttgcaatctatctctttaccttgataggcaatttagggctggttgtgttggtcattgaggattcctggctccacaaccccatgtattattttcttagtgttttatcattcttggatgcttgctattctacagttgtcactccaaaaatgttggtcaatttcctggcaaaaaataaatccatttcatttatcggatgtgcaacacagatgcttctttttgttacttttggaactacagaatgttttctcttggctgcaatggcttatgatcactatgtagccatctacaaccctctcctgtattcagtgagcatgtcacccagagtctatgtgccactcatcactgcttcctacgttgctggcattttacatgctactatacatatagtggctacatttagcctgtccttctgtggatccaatgaaattaggcatgtcttttgtgatatgcctcctctccttgctatttcttgttctgacactcacacaaaccagcttctactcttctactttgtgggttctattgagatagtcactatcctgattgtcctcatttcctgtgatttcattctgttgtccattctgaagatgcattctgctaagggaaggcaaaaggccttctctacatgtggctctcacctaactggagtgacaatttatcatggaacaattctcgtcagttatatgagaccaagttccagctatgcttcagaccatgacatcatagtgtcaatattttacacaattgtgattcccaagttgaatcccatcatctatagtttgaggaacaaagaagtaaaaaaggcagtgaagaaaatgttgaaattggtttacaaatga

SEQ ID NO: 131 - protein, 311 aa, Homo sapiens
MGRRNNTNVPDFILTGLSDSEEVQMALFILFLLIYLITMLGNVGMILIIRLDLQLHTPMYFFLTHLSFIDLSYSTVITPKTLANLLTSNYISFMGCFAQMFFFVFLGAAECFLLSSMAYDRYVAICSPLRYPVIMSKRLCCALVTGPYVISFINSFVNVVWMSRLHFCDSNVVRHFFCDTSPILALSCMDTYDIEIMIHILAGSTLMVSLITISASYVSILSTILKINSTSGKQKALSTCASHLLGVTIFYGTMIFTYLKPRKSYSLGRDQVASVFYTIVIPMLNPLIYSLRNKEVKNALIRVMQRRQDSR

SEQ ID NO: 132 - DNA, 936 bp, Homo sapiens
atgggtagaagaaataacacaaatgtgcctgacttcatccttacgggactgtcagattctgaagaggtccagatggccctctttatactatttctcctgatatacctaattactatgctgggcaatgtggggatgatattgataatccgcctggacctccagcttcacactcccatgtattttttccttactcacttgtcatttattgacctcagttactcaactgtcatcacacctaaaaccttagcgaacttactgacttccaactatatttccttcatgggctgctttgcccagatgttcttttttgtcttcttgggagctgctgaatgttttcttctctcatcaatggcctatgatcgctacgtagctatctgcagtcctctacgttacccagttattatgtccaaaaggctgtgttgcgctcttgtcactgggccctatgtgattagctttatcaactcctttgtcaatgtggtttggatgagcagactgcatttctgcgactcaaatgtagttcgtcactttttctgcgacacgtctccaattttagctctgtcctgcatggacacatacgacattgaaatcatgatacacattttagctggttccaccctgatggtgtcccttatcacaatatctgcatcctatgtgtccattctctctaccatcctgaaaattaattccacttcaggaaagcagaaagctttgtctacttgtgcctctcatctcttgggagtcaccatcttttatggaactatgatttttacttatttaaaaccaagaaagtcttattctttgggaagggatcaagtggcttctgttttttatactattgtgattcccatgctgaatccactcatttatagtcttagaaacaaagaagttaaaaatgctctcattagagtcatgcagagaagacaggactccaggtaa

SEQ ID NO: 133 - protein, 316 aa, Homo sapiens
MAPENFTRVTEFILTGVSSCPELQIPLFLVFLVLYGLTMAGNLGIITLTSVDSRLQTPMYFFLQHLALINLGNSTVIAPKMLINFLVKKKTTSFYECATQLGGFLFFIVSEVIMLALMACDRYVAICNPLLYMVVVSRRLCLLLVSLTYLYGFSTAIVVSSYVFSVSYCSSNIINHFYCDNVPLLALSCSDTYLPETVVFISAATNVVGSLIIVLVSYFNIVLSILKICSSEGRKKAFSTCASHMMAVTIFYGTLLFMYVQPRSNHSLDTDDKMASVFYTLVIPMLNPLIYSLRNKDVKTALQRFMTNLCYSFKTM

SEQ ID NO: 134 - DNA, 951 bp, Homo sapiens
atggctcctgaaaatttcaccagggtcactgagtttattcttacaggtgtctctagctgtccagagctccagattcccctcttcctggtctttctggtgctctatgggctgaccatggcagggaacctgggcatcatcaccctcaccagtgttgactctcgacttcaaacccccatgtactttttcctgcaacatctggctctcattaatcttggtaactctactgtcattgcccctaaaatgctgattaactttttagtaaagaagaaaactacctcattctatgaatgtgccacccaactgggagggttcttgttctttattgtatcggaggtaatcatgctggctttgatggcctgtgaccgctatgtggctatttgtaaccctctgctgtacatggtggtggtgtctcggcggctctgcctcctgctggtctccctcacatacctctatggcttttctacagctattgtggtttcatcttatgtattctctgtgtcttattgctcttctaatataatcaatcatttttactgtgataatgttcctctgttagcattatcttgctctgatacttacttaccagaaacagttgtctttatatctgcagcaacaaatgtggttggttccttgattatagttctagtatcttatttcaatattgttttgtctattttaaaaatatgttcatcagaaggaaggaaaaaagccttttctacctgtgcttcacatatgatggcagtcacaattttttatgggacattgctattcatgtatgtgcagccccgaagtaaccattcattggatactgatgataagatggcttctgtgttttacacgttggtaattcctatgctgaatcccttgatctacagcctgaggaataaggatgtgaagactgctctacagagattcatgacaaatctgtgctattcctttaaaacaatgtaa

SEQ ID NO: 135 - protein, 319 aa, Homo sapiens
MNHVVKHNHTAVTKVTEFILMGITDNPGLQAPLFGLFLIIYLVTVIGNLGMVILTYLDSKLHTPMYFFLRHLSITDLGYSTVIAPKMLVNFIVHKNTISYNWYATQLAFFEIFIISELFILSAMAYDRYVAICKPLLYVIIMAEKVLWVLVIVPYLYSTFVSLFLTIKLFKLSFCGSNIISYFYCDCIPLMSILCSDTNELELIILIFSGCNLLFSLSIVLISYMFILVAILRMNSRKGRYKAFSTCSSHLTVVIMFYGTLLFIYLQPKSSHTLAIDKMASVFYTLLIPMLNPLIYSLRNKEVKDALKRTLTNRFKIPI

SEQ ID NO: 136 - DNA, 960 bp, Homo sapiens
atgaatcatgtggtaaaacacaatcacacggcagtgaccaaggtgactgaatttattctcatggggattacagacaaccctgggctgcaggctccactgtttggactcttcctcatcatatatctggtcacagtgataggcaatctgggcatggttatcttgacctacttggactccaagctacacacccccatgtactttttccttagacatttgtcaatcactgatcttggttactccactgtcattgccccgaagatgttagtaaacttcatagtgcacaaaaacacaatttcttacaattggtatgccactcagctagcattctttgagattttcatcatctctgagctctttattctatcagcaatggcctatgatcgctacgtagccatctgtaaacctcttctgtacgtgatcatcatggcagagaaagtactttgggtgctggtaattgttccctatctctatagcacgtttgtgtcactatttctcacaattaagttatttaaactgtccttctgtggctcaaacataatcagctatttttactgtgactgtatccctctgatgtccatactctgttctgacacaaatgaattagaattaataattttgatcttctcaggctgtaatttgctcttctccctctcaattgttctcatatcctacatgtttattctagtggccattctcagaatgaactcaaggaaagggaggtacaaagccttctccacctgtagctctcatctgacagtggtgatcatgttctatgggacattgttatttatttacttgcaacccaagtccagtcatactttggctattgataaaatggcctcagtgttttataccctgttgattcctatgctgaatccgttgatctacagcctaaggaacaaagaagtaaaagatgctctaaagagaactttaaccaatcgattcaaaattcccatttaa

SEQ ID NO: 137 - protein, 312 aa, Homo sapiens
MEQHNLTTVNEFILTGITDIAELQAPLFALFLMIYVISVMGNLGMIVLTKLDSRLQTPMYFFLRHLAFMDLGYSTTVGPKMLVNFVVDKNIISYYFCATQLAFFLVFIGSELFILSAMSYDLYVAICNPLLYTVIMSRRVCQVLVAIPYLYCTFISLLVTIKIFTLSFCGYNVISHFYCDSLPLLPLLCSNTHEIELIILIFAAIDLISSLLIVLLSYLLILVAILRMNSAGRQKAFSTCGAHLTVVIVFYGTLLFMYVQPKSSHSFDTDKVASIFYTLVIPMLNPLIYSLRNKDVKYALRRTWNNLCNIFV

SEQ ID NO: 138 - DNA, 939 bp, Homo sapiens
atggaacaacacaatctaacaacggtgaatgaattcattcttacgggaatcacagatatcgctgagctgcaggcaccattatttgcattgttcctcatgatctatgtgatctcagtgatgggcaatttgggcatgattgtcctcaccaagttggactccaggttgcaaacccctatgtacttttttctcagacatctggctttcatggatcttggttattcaacaactgtgggacccaaaatgttagtaaattttgttgtggataagaatataatttcttattatttttgtgcaacacagctagctttctttcttgtgttcattggtagtgaactttttattctctcagccatgtcctacgacctctatgtggccatctgtaaccctctgctatacacagtaatcatgtcacgaagggtatgtcaggtgctggtagcaatcccttacctctattgcacattcatttctcttctagtcaccataaagatttttactttatccttctgtggctacaacgtcattagtcatttctactgtgacagtctccctttgttacctttgctttgttcaaatacacatgaaattgaattgataattctgatctttgcagctattgatttgatttcatctcttctgatagttcttttatcttacctgctcatccttgtagccattctcaggatgaattctgctggcagacaaaaggctttttctacctgtggagcccacctgacagtggtcatagtgttctatgggactttgcttttcatgtacgtgcagcccaagtccagtcattcctttgacactgataaagtggcttccatattttacaccctggttatccccatgttgaatcccttgatctatagtttacgaaacaaagatgtaaaatatgccctacgaaggacatggaataacttatgtaatatttttgtttaa

SEQ ID NO: 139 - protein, 337 aa, Homo sapiens [sequence omitted]

SEQ ID NO: 140 - DNA, 1014 bp, Homo sapiens
atggaagggaaaaatcaaaccaatatctctgaatttctcctcctgggcttctcaagttggcaacaacagcaggtgctactctttgcacttttcctgtgtctctatttaacagggctgtttggaaacttactcatcttgctggccattggctcggatcactgccttcacacacccatgtatttcttccttgccaatctgtccttggtagacctctgccttccctcagccacagtccccaagatgctactgaacatccaaacccaaacccaaaccatctcctatcccggctgcctggctcagatgtatttctgtatgatgtttgccaatatggacaattttcttctcacagtgatggcatatgaccgttacgtggccatctgtcaccctttacattactccaccattatggccctgcgcctctgtgcctctctggtagctgcaccttgggtcattgccattttgaaccctctcttgcacactcttatgatggcccatctgcacttctgctctgataatgttatccaccatttcttctgtgatatcaactctctcctccctctgtcctgttccgacaccagtcttaatcagttgagtgttctggctacggtggggctgatctttgtggtaccttcagtgtgtatcctggtatcctatatcctcattgtttctgctgtgatgaaagtcccttctgcccaaggaaaactcaaggctttctctacctgtggatctcaccttgccttggtcattcttttctatggagcaaacacaggggtctatatgagccccttatccaatcactctactgaaaaagactcagccgcatcagtcatttttatggttgtagcacctgtgttgaatccattcatttacagtttaagaaacaatgaactgaaggggactttaaaaaagaccctaagccggccgggcgcggtggctcacgcctgtaatcccagcactttgggaggccgaggcgggtggatcatgaggtcaggagatcgagaccatcctggctaa

SEQ ID NO: 141 - protein, 314 aa, Homo sapiens
MENNTEVSEFILLGLTNAPELQVPLFIMFTLIYLITLTGNLGMIILILLDSHLHTPMYFFLSNLSLAGIGYSSAVTPKVLTGLLIEDKAISYSACAAQMFFCAVFATVENYLLSSMAYDRYAAVCNPLHYTTTMTTRVCACLAIGCYVIGFLNASIQIGDTFRLSFCMSNVIHHFFCDKPAVITLTCSEKHISELILVLISSFNVFFALLVTLISYLFILITILKRHTGKGYQKPLSTCGSHLIAIFLFYITVIIMYIRPSSSHSMDTDKIASVFYTMIIPMLSPIVYTLRNKDVKNAFMKVVEKAKYSLDSVF

SEQ ID NO: 142 - DNA, 945 bp, Homo sapiens
atggagaataatacagaggtgagtgaattcatcctgcttggtctaaccaatgccccagaactacaggttcccctctttatcatgtttaccctcatctacctcatcactctgactgggaacctggggatgatcatattaatcctgctggactctcatctccacactcccatgtacttttttctcagtaacctgtctcttgcaggcattggttactcctcagctgtcactccaaaggttttaactgggttgcttatagaagacaaagccatctcctacagtgcctgtgctgctcagatgttcttttgtgcagtctttgccactgtggaaaattacctcttgtcctcaatggcctatgaccgctacgcagcagtgtgtaaccccctacattataccaccaccatgacaacacgtgtgtgtgcttgtctggctataggctgttatgtcattggttttctgaatgcttctatccaaattggagatacatttcgcctctctttctgcatgtccaatgtgattcatcactttttctgtgacaaaccagcagtcattactctgacctgctctgagaaacacattagtgagttgattcttgttcttatatcaagttttaatgtcttttttgcacttcttgttaccttgatttcctatctgttcatattgatcaccattcttaagaggcacacaggtaagggataccagaagcctttatctacctgtggttctcacctcattgccattttcttattttatataactgtcatcatcatgtacatacgaccaagttccagtcattccatggacacagacaaaattgcatctgtgttctacactatgatcatccccatgctcagtcctatagtctataccctgaggaacaaagacgtgaagaatgcattcatgaaggttgttgagaaggcaaaatattctctagattcagtcttttaa

SEQ ID NO: 143 - protein, 314 aa, Homo sapiens
MGDVNQSVASDFILVGLFSHSGSRQLLFSLVAVMFVIGLLGNTVLLFLIRVDSRLHTPMYFLLSQLSLFDIGCPMVTIPKMASDFLRGEGATSYGGGAAQIFFLTLMGVAEGVLLVLMSYDRYVAVCQPLQYPVLMRRQVCLLMMGSSWVVGVLNASIQTSITLHFPYCASRIVDHFFCEVPALLKLSCADTCAYEMALSTSGVLILMLPLSLIATSYGHVLQAVLSMRSEEARHKAVTTCSSHITVVGLFYGAAVFMYMVPCAYHSPQQDNVVSLFYSLVTPTLNPLIYSLRNPEVWMALVKVLSRAGLRQMC

SEQ ID NO: 144 - DNA, 945 bp, Homo sapiens
atgggggatgtgaatcagtcggtggcctcagacttcattctggtgggcctcttcagtcactcaggatcacgccagctcctcttctccctggtggctgtcatgtttgtcataggccttctgggcaacaccgttcttctcttcttgatccgtgtggactcccggctccacacacccatgtacttcctgctcagccagctctccctgtttgacattggctgtcccatggtcaccatccccaagatggcatcagactttctgcggggagaaggtgccacctcctatggaggtggtgcagctcaaatattcttcctcacactgatgggtgtggctgagggcgtcctgttggtcctcatgtcttatgaccgttatgttgctgtgtgccagcccctgcagtatcctgtacttatgagacgccaggtatgtctgctgatgatgggctcctcctgggtggtaggtgtgctcaacgcctccatccagacctccatcaccctgcattttccctactgtgcctcccgtattgtggatcacttcttctgtgaggtgccagccctactgaagctctcctgtgcagatacctgtgcctacgagatggcgctgtccacctcaggggtgctgatcctaatgctccctctttccctcatcgccacctcctacggccacgtgttgcaggctgttctaagcatgcgctcagaggaggccagacacaaggctgtcaccacctgctcctcgcacatcacggtagtggggctcttttatggtgccgccgtgttcatgtacatggtgccttgcgcctaccacagtccacagcaggataacgtggtttccctcttctatagccttgtcacccctacactcaacccccttatctacagtctgaggaatccggaggtgtggatggctttggtcaaagtgcttagcagagctggactcaggcaaatgtgctga

SEQ ID NO: 145 - protein, 331 aa, Homo sapiens
MSPDGNHSSDPTEFVLAGLPNLNSARVELFSVFLLVYLLNLTGNVLIVGVVRADTRLQTPMYFFLGNLSCLEILLTSVIIPKMLSNFLSRQHTISFAACITQFYFYFFLGASEFLLLAVMSADRYLAICHPLRYPLLMSGAVCFRVALACWVGGLVPVLGPTVAVALLPFCKQGAVVQHFFCDSGPLLRLACTNTKKLEETDFVLASLVIVSSLLITAVSYGLIVLAVLSIPSASGRQKAFSTCTSHLIVVTLFYGSAIFLYVRPSQSGSVDTNWAVTVITTFVTPLLNPFIYALRNEQVKEALKDMFRKVVAGVLGNLLLDKCLSEKAVK

SEQ ID NO: 146 - DNA, 996 bp, Homo sapiens
atgagtcctgatgggaaccacagtagtgatccaacagagttcgtcctggcagggctcccaaatctcaacagcgcaagagtggaattattttctgtgtttcttcttgtctatctcctgaatctgacaggcaatgtgttgattgtgggggtggtaagggctgatactcgactacagacccctatgtacttctttctgggtaacctgtcctgcctagagatactgctcacttctgtcatcattccaaagatgctgagcaatttcctctcaaggcaacacactatttcctttgctgcatgtatcacccaattctatttctacttctttctcggggcctccgagttcttactgttggctgtcatgtctgcggatcgctacctggccatctgtcatcctctgcgctaccccttgctcatgagtggggctgtgtgctttcgtgtggccttggcctgctgggtggggggactcgtccctgtgcttggtcccacagtggctgtggccttgcttcctttctgtaagcagggtgctgtggtacagcacttcttctgcgacagtggcccactgctccgcctggcttgcaccaacaccaagaagctggaggagactgactttgtcctggcctccctcgtcattgtatcttccttgctgatcactgctgtgtcctacggcctcattgtgctggcagtcctgagcatcccctctgcttcaggccgtcagaaggccttctctacctgtacctcccacttgatagtggtgaccctcttctatggaagtgccatttttctctatgtgcggccatcgcagagtggttctgtggacactaactgggcagtgacagtaataacgacatttgtgacaccactgttgaatccattcatctatgccttacgtaatgagcaagtcaaggaagctttgaaggacatgtttaggaaggtagtggcaggcgttttagggaatcttttacttgataaatgtctcagtgagaaagcagtaaagtaa

SEQ ID NO: 147 - protein, 319 aa, Homo sapiens
MTPGELALASGNHTPVTKFILQGFSNYPDLQELLFGAILLIYAITVVGNLGMMALIFTDSHLQSPMYFFLNVLSFLDICYSSVVTPKLLVNFLVSDKSISFEGCVVQLAFFVVHVTAESFLLASMAYDRFLAICQPLHYGSIMTRGTCLQLVAVSYAFGGANSAIQTGNVFALPFCGPNQLTHYYCDIPPLLHLACANTATARVVLYVFSALVTLLPAAVILTSYCLVLVAIGRMRSVAGREKDLSTCASHFLAIAIFYGTVVFTYVQPHGSTNNTNGQVVSVFYTIIIPMLNPFIYSLRNKEVKGALQRKLQVNIFPG

SEQ ID NO: 148 - DNA, 960 bp, Homo sapiens
atgacacctggagaactagcccttgccagtggcaaccacaccccagtcaccaagttcatcttgcagggattctccaattatccagacctccaggagcttctcttcggagccatcctgctcatctatgccataacagtggtgggcaacttgggaatgatggcactcatcttcacagactcccatctccaaagcccaatgtatttcttcctcaatgtcctctcgtttcttgatatttgttactcttctgtggtcacacctaagctcttggtcaacttcctggtctctgacaagtccatctcttttgagggctgtgtggtccagctcgccttctttgtagtgcatgtgacagctgagagcttcctgctggcctccatggcctatgaccgcttcctagccatctgtcaacccctccattatggttctatcatgaccagggggacctgtctccagctggtagctgtgtcctatgcatttggtggagccaactccgctatccagactggaaatgtctttgccctgcctttctgtgggcccaaccagctaacacactactactgtgacataccaccccttctccacctggcttgtgccaacacagccacagcaagagtggtcctctatgtcttttctgctctggtcacccttctgcctgctgcagtcattctcacctcctactgcttggtcttggtggccattgggaggatgcgctcagtagcagggagggagaaggacctctccacttgtgcctcccactttctggccattgccattttctatggcactgtggttttcacctatgttcagccccatggatctactaacaataccaatggccaagtagtgtccgtcttctacaccatcataattcccatgctcaatcccttcatctatagcctccgcaacaaggaggtgaagggcgctctgcagaggaagcttcaggtcaacatctttcccggctga

SEQ ID NO: 149 - protein, 309 aa, Homo sapiens
MEGINKTAKMQFFFRPFSPDPEVQMLIFVVFLMMYLTSLGGNATIAVIVQINHSLHTPMYFFLANLAVLEIFYTSSITPLALANLLSMGKTPVSITGCGTQMFFFVFLGGADCVLLVVMAYDRFIAICHPLRYRLIMSWSLCVELLVGSLVLGFLLSLPLTILIFHLPFCHNDEIYHFYCDMPAVMRLACADTRVHKTALYIISFIVLSIPLSLISISYVFIVVAILRIRSAEGRQQAYSTCSSHILVVLLQYGCTSFIYLSPSSSYSPEMGRVVSVAYTFITPILNPLIYSLRNKELKDALRKALRKF

SEQ ID NO: 150 - DNA, 930 bp, Homo sapiens
atggaaggaataaataaaactgcaaagatgcagtttttctttcgtccattctcacctgaccctgaggtccagatgctgatttttgtggtcttcctgatgatgtatctgaccagcctcggtggaaatgctacaattgcagtcattgttcagatcaatcattccctccacacccccatgtactttttcctggctaatctggcagttctagaaatcttctatacatcttccatcaccccattggccttggcaaacctcctttcaatgggcaaaactcctgtttccatcacgggatgtggcacccagatgtttttctttgtcttcttgggtggggctgattgtgtcctgctggtagtcatggcttatgaccggtttatagcgatctgtcaccctctgcgatacaggctcatcatgagctggtccttgtgtgtggagctgctggtaggctccttggtgctggggttcctgttgtcactgccactcaccattttaatcttccatctcccattctgccacaatgatgagatctaccacttctactgtgacatgcctgcagtcatgcgcctggcttgtgcagacacacgcgttcacaagactgctctgtatatcatcagcttcatcgtccttagcatccccctctcattgatctccatctcctatgtcttcatcgtggtagccattttacggatccggtcagcagaagggcgccagcaagcctactctacctgctcttctcacatcttagtggtcctcctgcagtatggctgcaccagctttatatacttgtcccccagttccagctactctcctgagatgggccgggtggtatctgtggcctacacatttatcactcccattttaaaccccttgatctatagtttgaggaacaaggaactgaaagatgccctaaggaaagcattgagaaaattctag

SEQ ID NO: 151 - protein, 409 aa, Homo sapiens
MGVKNHSTVTEFLLSGLTEQAELQLPLFCLFLGIYTVTVVGNLSMISIIRLNRQLHTPMYYFLSSLSFLDFCYSSVITPKMMKLWMESHLIVPETRPSPRMMSNQTLVTEFILQGFSEHPEYRVFLFSCFLFLYSGALTGNVLITLAITFNPGLHAPMYFFLLNLATMDIICTSSIMPKALASLVSEESSISYGGCMAQLYFLTWAASSELLLLTVMAYDRYAAICHPLHYSSMMSKVFCSGLATAVWLLCAVNTAIHTGLMLRLDFCGPNVIIHFFCEVPPLLLLSCSSTYVNGVMIVLADAFYGIVNFLMTIASYGFIVSSILKVKTAWGRQKAFSTCSSHLTVVCMYYTAVFYAYISPVSGYSAGKSKLAGLLYTVLSPTLNPLIYTLRNKEVKAALRKLFPFFRN

SEQ ID NO: 152 - DNA, 987 bp, Homo sapiens
atgaagctgtggatggagagtcacctgatagtcccagaaacccgtcccagcccaaggatgatgagtaaccagacgttggtaaccgagttcatcctgcagggcttttcggagcacccagaataccgggtgttcttattcagctgtttcctcttcctctactctggggccctcacaggtaatgtcctcatcaccttggccatcacgttcaaccctgggctccacgctcctatgtactttttcttactcaacttggctactatggacattatctgcacctcttccatcatgcccaaggcgctggccagtctggtgtcggaagagagctccatctcctacgggggctgcatggcccagctctatttcctcacgtgggctgcatcctcagagctgctgctcctcacggtcatggcctatgaccggtacgcagccatctgccacccgctgcattacagcagcatgatgagcaaggtgttctgcagcgggctggccacagccgtgtggctgctctgcgccgtcaacacggccatccacacggggctgatgctgcgcttggatttctgtggccccaatgtcattatccatttcttctgcgaggtccctcccctgctgcttctctcctgcagctccacctacgtcaacggtgtcatgattgtcctggcggatgctttctacggcatagtgaacttcctgatgaccatcgcgtcctatggcttcatcgtctccagcatcctgaaggtgaagactgcctgggggaggcagaaagccttctccacctgctcttcccacctcaccgtggtgtgcatgtattacaccgctgtcttctacgcctacataagcccggtctctggctacagcgcagggaagagcaagttggctggcctgctgtacactgtgctgagtcctaccctcaaccccctcatctatactttgagaaacaaggaggtcaaagcagccctcaggaagcttttccctttcttcagaaattaa

SEQ ID NO: 153 - protein, 310 aa, Homo sapiens
MQLNNNVTEFILLGLTQDPFWKKIVFVIFLRLYLGTLLGNLLIIISVKASQALKNPMFFFLFYLSLSDTCLSTSIAPRMIVDALLKKTTISFSECMIQVFSSHVFGCLEIFILILTAVDRYVDICKPLHYMTIISQWVCGVLMAVAWVGSCVHSLVQIFLALSLPFCGPNVINHCFCDLQPLLKQACSETYVVNLLLVSNSGAICAVSYVMLIFSYVIFLHSLRNHSAEVIKKALSTCVSHIIVVILFFGPCIFMYTCPATVFPMDKMIAVFYTVGTSFLNPVIYTLKNTEVKSAMRKLWSKKLITDDKR

SEQ ID NO: 154 - DNA, 933 bp, Homo sapiens
atgcaactgaataataatgtgactgagttcattctgcttggattgacacaggatcctttttggaagaaaatagtgtttgttatttttttgcgtctctacttgggaacactgttgggtaatttgctaatcattattagtgtcaaggccagccaggcacttaagaacccaatgttcttcttccttttctacttatctttatctgatacttgcctctctacttccatagcccctagaatgattgtggatgcccttttgaagaagacaactatctccttcagcgagtgcatgatccaagtcttttcatcccatgtctttggctgcctggagatcttcatcctcatcctcacggctgttgaccgctatgtggacatctgtaagcccctgcactacatgaccatcataagccagtgggtctgtggtgttttgatggctgtggcctgggtgggatcctgtgtgcattctttagttcagatttttcttgccctgagtttgccattctgtggccccaatgtgatcaatcactgtttctgtgacttgcagcccttgttgaaacaagcctgttcagaaacctatgtggttaacctactcctggtttccaatagtggggccatttgtgcagtgagttatgtcatgctaatattctcctatgtcatcttcttgcattctctgagaaaccacagtgctgaagtgataaagaaagcactttccacatgtgtctcccacatcattgtggtcatcttgttctttggaccttgcatatttatgtacacatgccctgcaaccgtattccccatggataagatgatagctgtattttatacagttggaacatcttttctcaaccctgtgatttacacgctgaagaatacagaagtgaaaagtgccatgaggaagctttggagcaagaaattgatcacagatgacaaaagataa

SEQ ID NO: 155 - protein, 347 aa, Homo sapiens
MGNWTAAVTEFVLLGFSLSREVELLLLVLLLPTFLLTLLGNLLIISTVLSCSRLHTPMYFFLCNLSILDILFTSVISPKVLANLGSRDKTISFAGCITQCYFYFFLGTVEFLLLTVMSYDRYATICCPLRYTTIMRPSVCIGTVVFSWVGGFLSVLFPTILISQLPFCGSNIINHFFCDSGPLLALACADTTAIELMDFMLSSMVILCCIVLVAYSYTYIILTIVRIPSASGRKKAFNTCASHLTIVIIPSGITVFIYVTPSQKEYLEINKIPLVLSSVVTPFLNPFIYTLRNDTVQGVLRDVWVRVRGVFEKRMRAVLRSRLSSNKDHQGRACSSPPCVYSVKLQC

SEQ ID NO: 156 - DNA, 1044 bp, Homo sapiens
atgggtaactggactgcagcggtgactgagtttgttctgctggggttttccctgagcagggaggtggagctgctgctcctggtgctcctgctgcccacgttcctgctgactcttctggggaacctgctcatcatctccactgtgctgtcctgctcccgcctccacacccccatgtacttcttcttgtgcaacctctctatcctggacatcctcttcacctcagtcatctctccaaaagtgttggccaacttaggatctagggataaaaccatctcctttgccggatgtatcacccagtgctatttctactttttcttgggcacagttgagttcctcctgctgacggtcatgtcctatgaccgttatgccaccatctgctgccccctgcggtacaccaccatcatgagaccttctgtctgcattgggaccgttgtattctcttgggtgggaggcttcctgtctgtgctctttccaaccatcctcatctcccagctgcccttctgtggctccaatatcattaaccacttcttctgtgacagtggacccttgctggccctggcctgtgcagacaccactgccatcgagctgatggattttatgctttcttccatggtcatcctctgctgcatagtcctcgtggcctattcctatacgtacatcatcttgaccatagtgcgcattccttctgcaagtggaaggaagaaggcctttaatacctgtgcttcccacctgaccatagtcatcattcctagtggcatcactgtgtttatctatgtgactccctcccagaaagaatatctggagatcaacaagatccctttggttctgagcagtgtggtgactccattcctcaacccctttatatatactctgaggaatgacacagtgcagggagtcctcagggatgtgtgggtcagggttcgaggagtttttgaaaagaggatgagggcagtgctgagaagcagattatcctccaacaaagaccaccaaggaagggcttgctcttctccaccatgtgtctattctgtaaagctccagtgttag

SEQ ID NO: 157 - protein, 309 aa, Homo sapiens
MGAKNNVTEFVLFGLFESREMQHTCFVVFFLFHVLTVLGNLLVIITINARKTLKSPMYFFLSQLSFADICYPSTTIPKMIADTFVEHKIISFNGCMTQLFSAHFFGGTEIFLLTAMAYDRYVAICRPLHYTAIMDCRKCGLLAGASWLAGFLHSILQTLLTVQLPFCGPNEIDNFFCDVHPLLKLACADTYMVGLIVVANSGMISLASFFILIISYVIILLNLRSQSSEDRRKAVSTCGSHVITVLLVLMPPMFMYIRPSTTLAADKLIILFNIVMPPLLNPLIYTLRNNDVKNAMRKLFRVKRSLGEK

SEQ ID NO: 158 - DNA, 930 bp, Homo sapiens
atgggtgccaagaacaatgtgactgagtttgttttatttggcctttttgagagcagagagatgcagcatacatgctttgtggtattcttcctctttcatgtgctcactgtcctggggaaccttctggtcatcatcaccatcaatgctagaaagaccctgaagtctcccatgtatttcttcctgagccagttgtcttttgctgacatatgttatccatccactaccatacccaagatgattgctgacacttttgtggagcataagatcatctccttcaatggctgcatgacccagctcttttctgcccacttctttggtggcactgagatcttcctccttacagccatggcctatgaccgctatgtggccatctgtaggcccctgcactacacagccatcatggattgccggaagtgtggcctgctagcgggggcctcctggttagctggcttcctgcattccatcctgcagaccctcctcacggttcagctgcctttttgtgggcccaatgagatagacaacttcttctgtgatgttcatcccctgctcaagttggcctgtgcagacacctacatggtaggtctcatcgtggtggccaacagcggtatgatttctttagcatccttttttatccttatcatttcctatgttatcatcttactgaacctaagaagccagtcatctgaggaccggcgtaaggctgtctccacatgtggctcacacgtaatcactgtccttttggttctcatgccccccatgttcatgtacattcgtccctccaccaccctggctgctgacaaacttatcatcctctttaacattgtgatgccacctttgctgaaccctttgatctatacactaaggaacaacgatgtgaaaaatgccatgaggaagctgtttagggtcaagaggagcttaggggagaagtga

SEQ ID NO: 159 - protein, 329 aa, Homo sapiens
MQLVLLLMFLLVFIGNTAPAFSVTLESMDIPQNITEFFMLGLSQNSEVQRVLFVVFLLIYVVTVCGNMLIVVTITSSPTLASPVYFFLANLSFIDTFYSSSMAPKLIADSLYEGRTISYECCMAQLFGAHFLGGVEIILLTVMAYDRYVAICKPLHNTTIMTRHLCAMLVGVAWLGGFLHSLVQLLLVLWLPFCGPNVINHFACDLYPLLEVACTNTYVIGLLVVANSGLICLLNFLMLAASYIVILYSLRSHSADGRCKALSTCGAHFIVVALFFVPCIFTYVHPFSTLPIDKNMALFYGILTPMLNPLIYTLRNEEVKNAMRKLFTW

SEQ ID NO: 160 - DNA, 990 bp, Homo sapiens
atgcaattagttctattacttatgtttctccttgtctttataggcaatactgcacctgcattctcagtgaccttggaatctatggacataccacaaaatatcacagaatttttcatgctggggctctcacagaactcagaggtacagagagttctctttgtggtctttttgctgatctatgtggtcacggtttgtggcaacatgctcattgtggtcactatcacctccagccccacgctggcttcccctgtgtattttttcctggccaacctatcctttattgacaccttttattcttcttctatggctcctaaactcattgctgactcattgtatgaggggagaaccatctcttatgagtgctgcatggctcagctctttggagctcattttttgggaggtgttgagatcattctgctcacagtgatggcttatgaccgctatgtggccatctgtaagcccctgcacaatactaccatcatgaccaggcatctctgtgccatgcttgtaggggtggcttggcttgggggcttcctgcattcattggttcagctcctcctggtcctttggttgcccttctgtgggcccaatgtgatcaatcactttgcctgtgacttgtaccctttgctggaagttgcctgcaccaatacgtatgtcattggtctgctggtggttgccaacagtggtttaatctgcctgttgaacttcctcatgctggctgcctcctacattgtcatcctgtactccttgaggtcccacagtgcagatgggagatgcaaagccctctccacctgtggagcccacttcattgttgttgccttgttctttgtgccctgtatatttacttatgtgcatccattttctactttacctatagacaaaaatatggcattattttatggtattctgacacctatgttgaatccactcatttataccctgagaaatgaagaggtaaaaaatgccatgagaaagctctttacatggtaa

SEQ ID NO: 161 - protein, 359 aa, Homo sapiens
MNNIAQLSLGFIDLGIPSVLQKIILTKIILLFKMYVSNCNPCAIHRKINYPNTKLDFEQVNNITEFILLGLTQNAEAQKLLFAVFTLIYFLTMVDNLIIVVTITTSPALDSPVYFFLSFFSFIDGCSSSTMAPKMIFDLLTEKKTISFSGCMTQLFVEHFFGGVEIILLVVMAYDCYVAICKPLYYLITMNRQVCGLLVAMAWVGGFLHALIQMLLIVWLPFCGPNVIDHFICDLFPLLKLSCTDTHVFGLFVAANSGLMCMLIFSILITSYVLILCSQRKALSTCAFHITVVVLFFVPCILVYLRPMITFPIDKAVSVFYTVVTPMLNPLIYTLRNTEVKNAMKQLWSQIIWGNNLCD

SEQ ID NO: 162 - DNA, 1080 bp, Homo sapiens
atgaataacatagctcaacttagtcttgggtttatagatttagggattccatcagtgttacagaaaataatcctgaccaaaattattttattgttcaaaatgtatgtgtcaaattgcaatccttgtgctattcacagaaaaatcaattatccaaataccaaactggatttcgagcaagtgaacaacataacggaattcatcttgcttggcctgacacagaacgcagaggcacagaaactcttgtttgctgtgtttacactcatctactttctcaccatggtagacaacctaatcattgtggtgacaatcaccaccagcccagccctggactcccccgtgtatttttttctgtctttcttttccttcatagatggctgctcctcttctaccatggcccccaaaatgatatttgacttactcactgaaaagaaaactatttccttcagtgggtgcatgacccagctctttgtagaacatttctttgggggagttgagatcattctgctcgtggtgatggcctatgactgctatgtggccatctgcaagcccctgtactacctgatcacaatgaacaggcaggtatgtggcctcctggtggccatggcatgggtcgggggatttcttcacgctctgattcaaatgcttttaatagtctggctgcccttctgtggccccaatgtcattgaccatttcatctgtgaccttttccctctgctaaaactctcctgcactgacactcacgtctttggactctttgttgccgccaacagtgggctgatgtgtatgctcattttttctattcttattacctcttacgtcctaatcctctgctcacagcggaaggctctctctacctgcgccttccatatcactgtagtcgtcctattctttgttccctgtatattggtgtaccttcgacccatgatcaccttccctattgataaagctgtgtctgtgttttatactgtggtaacacccatgttaaaccctttaatctacaccctcagaaacacagaggtgaaaaatgccatgaagcagctctggagccaaataatctggggtaacaatttgtgtgattag

SEQ ID NO: 163 - protein, 323 aa, Homo sapiens
MWQKNQTSLADFILEGLFDDSLTHLFLFSLTMVVFLIAVSGNTLTILLICIDPQLHTPMYFLLSQLSLMDLMHVSTIILKMATNYLSGKKSISFVGCATQHFLYLCLGGAECFLLAVMSYDRYVAICHPLRYAVLMNKKVGLMMAVMSWLGASVNSLIHMAILMHFPFCGPRKVYHFYCEFPAVVKLVCGDITVYETTVYISSILLLLPIFLISTSYVFILQSVIQMRSSGSKRNAFATCGSHLTVVSLWFGACIFSYMRPRSQCTLLQNKVGSVFYSIITPTLNSLIYTLRNKDVAKALRRVLRRDVITQCIQRLQLWLPRV

SEQ ID NO: 164 - DNA, 972 bp, Homo sapiens
atgtggcagaagaatcagacctctctggcagacttcatccttgaggggctcttcgatgactcccttacccaccttttccttttctccttgaccatggtggtcttccttattgcggtgagtggcaacaccctcaccattctcctcatctgcattgatccccagcttcatacaccaatgtatttcctgctcagccagctctccctcatggatctgatgcatgtctccacaatcatcctgaagatggctaccaactacctatctggcaagaaatctatctcctttgtgggctgtgcaacccagcacttcctctatttgtgtctaggtggtgctgaatgttttctcttagctgtcatgtcctatgaccgctatgttgccatctgtcatccactgcgctatgctgtgctcatgaacaagaaggtgggactgatgatggctgtcatgtcatggttgggggcatccgtgaactccctaattcacatggcgatcttgatgcacttccctttctgtgggcctcggaaagtctaccacttctactgtgagttcccagctgttgtgaagttggtatgtggcgacatcactgtgtatgagaccacagtgtacatcagcagcattctcctcctcctccccatcttcctgatttctacatcctatgtcttcatccttcaaagtgtcattcagatgcgctcatctgggagcaagagaaatgcctttgccacttgtggctcccacctcacggtggtttctctttggtttggtgcctgcatcttctcctacatgagacccaggtcccagtgcactctattgcagaacaaagttggttctgtgttctacagcatcattacgcccacattgaattctctgatttatactctccggaataaagatgtagctaaggctctgagaagagtgctgaggagagatgttatcacccagtgcattcaacgactgcaattgtggttgccccgagtgtag

SEQ ID NO: 165 - protein, 348 aa, Homo sapiens [sequence omitted]

SEQ ID NO: 166 - DNA, 1047 bp, Homo sapiens
atgctggaccccagtatttccagtcacactctttatctccactctctgtttcctcagggattgagaaaggggacaatgtggcagaagaatcagacctctctggcagacttcatccttgaggggctcttcgatgactcccttacccaccttttccttttctccttgaccatggtggtcttccttattgcggtgagtggcaacaccctcaccattctcctcatctgcattgatccccagcttcatacaccaatgtatttcctgctcagccagctctccctcatggatctgatgcatgtctccacaaccatcctgaagatggctaccaactacctatctggcaagaaatctatctcctttgtgggctgtgcaacccagcacttcctctatttgtgtctaggtggtgctgaatgttttctcttagctgtcatgtcctatgaccgctatgttgccatctgtcatccactgcgctatgctgtgctcatgaacaagaaggtgggactgatgatggctgtcatgtcatggttgggggcatccgtgaactccctaattcacatggcgatcttgatgcacttccctttctgtgggcctcggaaagtctaccacttctactgtgagttcccagctgttgtgaagttggtatgtggcgacatcactgtgtatgagaccacagtgtacatcagcagcattctcctcctcctccccatcttcctgatttctacatcctatgtcttcatccttcaaagtgtcattcagatgcgctcatctgggagcaagagaaatgcctttgccacttgtggctcccacctcacggtggtttctctttggtttggtgcctgcatcttctcctacatgagacccaggtcccagtgcactctattgcagaacaaagttggttctgtgttctacagcatcattacgcccacattgaattctctgatttatactctccggaataaagatgtagctaaggctctgagaagagtgctgaggagagatgttatcacccagtgcattcaacgactgcaattgtggttgccccgagtgtag

SEQ ID NO: 167 - protein, 370 aa, Homo sapiens; identical to SEQ ID NO: 105

SEQ ID NO: 168 - DNA, 1113 bp, Homo sapiens; identical to SEQ ID NO: 106

SEQ ID NO: 169 - protein, 313 aa, Homo sapiens
MGNWSTVTEITLIAFPALLEIRISLFVVLVVTYTLTATGNITIISLIWIDHRLQTPMYFFLSNLSFLDILYTTVITPKLLACLLGEEKTISFAGCMIQTYFYFFLGTVEFILLAVMSFDRYMAICDPLHYTVIMNSRACLLLVLGCWVGAFLSVLFPTIVVTRLPYCRKEINHFFCDIAPLLQVACINTHLIEKINFLLSALVILSSLAFTTGSYVYIISTILRIPSTQGRQKAFSTCASHITVVSIAHGSNIFVYVRPNQNSSLDYDKVAAVLITVVTPLLNPFIYSLRNEKVQEVLRETVNRIMTLIQRKT

SEQ ID NO: 170 - DNA, 942 bp, Homo sapiens
atgggaaactggagcactgtgactgaaatcaccctaattgccttcccagctctcctggagattcgaatatctctcttcgtggttcttgtggtaacttacacattaacagcaacaggaaacatcaccatcatctccctgatatggattgatcatcgcctgcaaactccaatgtacttcttcctcagtaatttgtcctttctggatatcttatacaccactgtcattaccccaaagttgttggcctgcctcctaggagaagagaaaaccatatcttttgctggttgcatgatccaaacatatttctacttctttctggggacggtggagtttatcctcttggcggtgatgtcctttgaccgctacatggctatctgcgacccactgcactacacggtcatcatgaacagcagggcctgccttctgctggttctgggatgctgggtgggagccttcctgtctgtgttgtttccaaccattgtagtgacaaggctaccttactgtaggaaagaaattaatcatttcttctgtgacattgcccctcttcttcaggtggcctgtataaatactcacctcattgagaagataaactttctcctctctgcccttgtcatcctgagctccctggcattcactactgggtcctacgtgtacataatttctaccatcctgcgtatcccctccacccagggccgtcagaaagctttttctacctgtgcttctcacatcactgttgtctccattgcccacgggagcaacatctttgtgtatgtgagacccaatcagaactcctcactggattatgacaaggtggccgctgtcctcatcacagtggtgacccctctcctgaacccttttatctacagcttgaggaatgagaaggtacaggaagtgttgagagagacagtgaacagaatcatgaccttgatacaaaggaaaacttga

SEQ ID NO: 171 - protein, 312 aa, Homo sapiens
MRNGTVITEFILLGFPVIQGLQTPLFIAIFLTYILTLAGNGLIIATVWAEPRLQIPMYFFLCNLSFLEIWYTTTVIPKLLGTFVVARTVICMSCCLLQAFFHFFVGTTEFLILTIMSFDRYLTICNPLHHPTIMTSKLCLQLALSSWVVGFTIVFCQTMLLIQLPFCGNNVISHFYCDVGPSLKAACIDTSILELLGVIATILVIPGSLLFNMISYIYILSAILRIPSATGHQKTFSTCASHLTVVSLLYGAVLFMYLRPTAHSSFKINKVVSVLNTILTPLLNPFIYTIRNKEVKGALRKAMTCPKTGHAK

SEQ ID NO: 172 - DNA, 939 bp, Homo sapiens
atgagaaatggcacagtaatcacagaattcatcctgctaggctttcctgttatccaaggcctacaaacacctctctttattgcaatctttctcacctacatattaacccttgcaggcaatgggcttattattgccactgtgtgggctgagcccaggctacaaattccaatgtacttcttcctttgtaacttgtctttcttagaaatctggtacaccaccacagtcatccccaaactgctaggaacctttgtagtggcaagaacagtaatctgcatgtcctgctgcctgctgcaggccttcttccacttcttcgtgggcaccaccgagttcttgatcctcactatcatgtcttttgaccgctacctcaccatctgcaatccccttcaccaccccaccatcatgaccagcaaactctgcctgcagctggccctgagctcctgggtggtgggcttcaccattgtcttttgtcagacgatgctgctcatccagttgccattctgtggcaataatgttatcagtcatttctactgtgatgttgggcccagtttgaaagccgcctgcatagacaccagcattttggaactcctgggcgtcatagcaaccatccttgtgatcccagggtcacttctctttaatatgatttcttatatctacattctgtccgcaatcctacgaattccttcagccactggccaccaaaagactttctctacctgtgcctcgcacctgacagttgtctccctgctctacggggctgttctgttcatgtacctaagacccacagcacactcctcctttaagattaataaggtggtgtctgtgctaaatactatcctcaccccccttctgaatccctttatttatactattagaaacaaggaggtgaagggagccttaagaaaggcaatgacttgcccaaagactggtcatgcaaagtaa

SEQ ID NO: 173 - protein, 314 aa, Homo sapiens
MLMNYSSATEFYLLGFPGSEELHHILFAIFFFFYLVTLMGNTVIIMIVCVDKRLQSPMYFFLGHLSALEILVTTIIVPVMLWGLLLPGMQTIYLSACVVQLFLYLAVGTTEFALLGAMAVDRYVAVCNPLRYNIIMNRHTCNFVVLVSWVFGFLFQIWPVYVMFQLTYCKSNVVNNFFCDRGQLLKLSCNNTLFTEFILFLMAVFVLFGSLIPTIVSNAYIISTILKIPSSSGRRKSFSTCASHFTCVVIGYGSCLFLYVKPKQTQAADYNWVVSLMVSVVTPFLNPFIFTLRNDKVIEALRDGVKRCCQLFRN

SEQ ID NO: 174 - DNA, 945 bp, Homo sapiens
atgttgatgaattactctagtgccactgaattttatctccttggcttccctggctctgaagaactacatcatatcctttttgctatattcttctttttctacttggtgacattaatgggaaacacagtcatcatcatgattgtctgtgtggataaacgtctgcagtcccccatgtatttcttcctcggccacctctctgccctggagatcctggtcacaaccataatcgtccccgtgatgctttggggattgctgctccctgggatgcagacaatatatttgtctgcctgtgttgtccagctcttcttgtaccttgctgtggggacaacagagttcgcattacttggagcaatggctgtggaccgttatgtggctgtctgtaaccctctgaggtacaacatcattatgaacagacacacctgcaactttgtggttcttgtgtcatgggtgtttgggtttctttttcaaatctggccggtctatgtcatgtttcagcttacttactgcaaatcaaatgtggtgaacaattttttttgtgaccgagggcaattgctcaaactatcctgcaataatactcttttcacggagtttatcctcttcttaatggctgtttttgttctctttggttctttgatccctacaattgtctccaacgcctacatcatctccaccattctcaagatcccgtcatcctctggccggaggaaatccttctccacttgtgcctcccacttcacctgtgttgtgattggctacggcagctgcttgtttctctacgtgaaacccaagcaaacgcaggcagctgattacaattgggtagtttccctgatggtttcagtagtaactcctttcctcaatcctttcatcttcaccctccggaatgataaagtcatagaggcccttcgggatggggtgaaacgctgctgtcaactattcaggaattag

SEQ ID NO: 175 - protein, 315 aa, Homo sapiens
METWVNQSYTDGFFLLGIFSHSTADLVLFSVVMAVFTVALCGNVLLIFLIYMDPHLHTPMYFFLSQLSLMDLMLVCTNVPKMAANFLSGRKSISFVGCGIQIGLFVCLVGSEGLLLGLMAYDRYVAISHPLHYPILMNQRVCLQITGSSWAFGIIDGLIQMVVVMNFPYCGLRKVNHFFCEMLSLLKLACVDTSLFEKVIFACCVFMLLFPFSIIVASYAHILGTVLQMHSAQAWKKALATCSSHLTAVTLFYGAAMFIYLRPRHYRAPSHDKVASIFYTVLTPMLNPLIYSLRNREVMGALRKGLDRCRIGSQH

SEQ ID NO: 176 - DNA, 948 bp, Homo sapiens
atggagacgtgggtgaaccagtcctacacagatggcttcttcctcttaggcatcttctcccacagtactgctgaccttgtcctcttctccgtggttatggcggtcttcacagtggccctctgtgggaatgtcctcctcatcttcctcatctacatggaccctcaccttcacacccccatgtacttcttcctcagccagctctccctcatggacctcatgttggtctgtaccaatgtgccaaagatggcagccaacttcctgtctggcaggaagtccatctcctttgtgggctgtggcatacaaattggcctctttgtctgtcttgtgggatctgaggggctcttgctgggactcatggcttatgaccgctatgtggccattagccacccacttcactatcccatcctcatgaatcagagggtctgtctccagattactgggagctcctgggcctttgggataatcgatggcttgatccagatggtggtagtaatgaatttcccctactgtggcttgaggaaggtgaaccatttcttctgtgagatgctatccttgttgaagctggcctgtgtagacacatccctgtttgagaaggtgatatttgcttgctgtgtcttcatgcttctcttcccattctccatcatcgtggcctcctatgctcacattctagggactgtgctgcaaatgcactctgctcaggcctggaaaaaggccctggccacctgctcctcccacctgacagctgtcaccctcttctatggggcagccatgttcatctacctgaggcctaggcactaccgggcccccagccatgacaaggtggcctctatcttctacacggtccttactcccatgctcaaccccctcatttacagcttgaggaacagggaggtgatgggggcactgaggaaggggctggaccgctgcaggatcggcagccagcactga

SEQ ID NO: 177 - protein, 335 aa, Homo sapiens
MLGSKPRVHLYILPCASQQVSTMGDRGTSNHSEMTDFILAGFRVRPELHILLFLLFLFVYAMILLGNVGMMTIIMTDPRLNTPMYFFLGNLSFIDLFYSSVIEPKAMINFWSENKSISFAGCVAQLFLFALLIVTEGFLLAAMAYDRFIAICNPLLYSVQMSTRLCTQLVAGSYFCGCISSVIQTSMTFTLSFCASRAVDHFYCDSRPLQRLSCSDLFIHRMISFSLSCIIILPTIIVIIVSYMYIVSTVLKIHSTEGHKKAFSTCSSHLGVVSVLYGAVFFMYLTPDRFPELSKVASLCYSLVTPMLNPLIYSLRNKDVQEALKKFLEKKNIIL

SEQ ID NO: 178 - DNA, 1008 bp, Homo sapiens
atgctaggatccaaaccaagagttcatttgtatattttgccctgtgcctctcaacaggtttctaccatgggtgacaggggaacaagcaatcactcagaaatgactgacttcattcttgcaggcttcagggtacgcccagagctccacattctcctcttcctgctatttttgtttgtttatgccatgatccttctagggaatgttgggatgatgaccattattatgactgatcctcggctgaacacaccaatgtattttttcctaggcaatctctccttcattgatcttttctattcatctgttattgaacccaaggctatgatcaacttctggtctgaaaacaagtctatctcctttgcaggctgtgtggcccagctctttctctttgccctcctcattgtgactgagggatttctcctggcggccatggcttatgaccgctttattgccatctgcaaccctctgctctactctgttcaaatgtccacacgtctgtgtactcagttggtggctggttcctatttttgtggctgcattagctcagttattcagactagcatgacatttactttatctttttgcgcttctcgggctgttgaccacttttactgtgattctcgcccacttcagagactgtcttgttctgatctctttatccatagaatgatatctttttccttatcatgtattattatcttgcctactatcatagtcattatagtatcttacatgtatattgtgtccacagttctaaagatacattctactgagggacataagaaggccttctccacctgcagctctcacctgggagttgtgagtgtgctgtatggtgctgtcttttttatgtatctcactcctgacagatttcctgagctgagtaaagtggcatccttatgttactccctagtcactcccatgttgaatcctttgatttactctctgaggaacaaagatgtccaagaggctctaaaaaaatttctagagaagaaaaatattattctttga

SEQ ID NO: 179 - protein, 316 aa, Homo sapiens
MICENHTRVTEFILLGFTNNPEMQVSLFIFFLAIYTVTLLGNFLIVTVTSVDLALQTPMYFFLQNLSLLEVCFTLVMVPKMLVDLVSPRKIISFVGCGTQMYFFFFFGSSECFLLSMMAYDRFVAICNPLHYSVIMNRSLCLWMAIGSWMSGVPVSMLQTAWMMALPFCGPNAVDHFFCDGPPVLKLVTVDTTMYEMQALASTLLFIMFPFCLILVSYTRIIITILRMSSATGRQKAFSTCSSHLIVVSLFYGTASLTYLRPKSNQSPESKKLVSLSYTVITPMLNPIIYGLRNNEVKGAVKRTITQKVLQKLDVF

SEQ ID NO: 180 - DNA, 951 bp, Homo sapiens
atgatctgtgaaaatcacaccagagtcactgaatttattcttcttggttttacaaacaaccccgagatgcaagtttccctctttatttttttcctggccatttatacagtcactttgttgggcaactttcttattgtcacagttaccagtgtggatctcgcacttcaaacacccatgtacttctttcttcaaaatctgtcacttcttgaagtatgtttcaccttggttatggtgccaaaaatgcttgtagatctagtgtccccaaggaaaattatctcttttgtgggctgtggtacccagatgtacttcttcttcttctttggcagttctgaatgtttccttctctccatgatggcttatgatcgctttgtggccatctgtaaccctctccattattcagtcataatgaacaggtccctatgcttgtggatggccataggctcttggatgtccggtgttcctgtgtctatgctacagacagcttggatgatggcccttcctttctgtggaccaaatgccgtggaccactttttctgtgatggtcccccagtgttaaaactagtcacagtggatacaaccatgtatgaaatgcaagcacttgcctccacactcctgtttatcatgtttcccttttgtctcattttggtttcctacacccgcattatcataacaattctgaggatgtcctctgccactggccgccagaaggcattttctacttgttcctcacacctcattgtggtgtccctcttctacggaacagccagtctgacctacctgcggcccaaatcaaaccagtcccctgagagcaagaagctagtgtcattgtcctacactgtcatcacacctatgctaaaccccatcatctacggcctgaggaacaatgaagtgaaaggggctgtcaagaggacaatcactcaaaaagtcttacagaagttagatgtgttttga

SEQ ID NO: 181 - protein, 362 aa, Homo sapiens
MTEFHLQSQMPSIRLIFRRLSLGRIKPSQSPRCSTSFMVVPSFSIAEHWRRMKGANLSQGMEFELLGLTTDPQLQRLLFVVFLGMYTATLLGNLVMFLLIHVSATLHTPMYSLLKSLSFLDFCYSSTVVPQTLVNFLAKRKVISYFGCMTQMFFYAGFATSECYLIAAMAYDRYAAICNPLLYSTIMSPEVCASLIVGSYSAGFLNSLIHTGCIFSLKFCGAHVVTHFFCDGPPILSLSCVDTSLCEILLFIFAGFNLLSCTLTILISYFLILNTILKMSSAQGRFKAFSTCASHLTAICLFFGTTLFMYLRPRSSYSLTQDRTVAVIYTVVIPVLNPLMYSLRNKDVKKALIKVWGRKTME

SEQ ID NO: 182 - DNA, 1089 bp, Homo sapiens
atgacagagtttcatctgcaaagccaaatgccctcaataagactcatcttcagaaggctgtccttaggcagaattaaacccagtcagagccccaggtgttcaacctcatttatggtggtgccttctttctccatcgcagagcactggagaaggatgaaaggggcaaacctgagccaagggatggagtttgagctcttgggcctcaccactgacccccagctccagaggctgctcttcgtggtgttcctgggcatgtacacagccactctgctggggaacctggtcatgttcctcctgatccatgtgagtgccaccctgcacacacccatgtactccctcctgaagagcctctccttcttggatttctgctactcctccacggttgtgccccagaccctggtgaacttcttggccaagaggaaagtgatctcttattttggctgcatgactcagatgttcttctatgcgggttttgccaccagtgagtgctatctcatcgctgccatggcctatgaccgctatgccgctatttgtaaccccctgctctactcaaccatcatgtctcctgaggtctgtgcctcgctgattgtgggctcctacagtgcaggattcctcaattctcttatccacactggctgtatctttagtctgaaattctgcggtgctcatgtcgtcactcacttcttctgtgatgggccacccatcctgtccttgtcttgtgtagacacctcactgtgtgagatcctgctcttcatttttgctggtttcaaccttttgagctgcaccctcaccatcttgatctcctacttcttaattctcaacaccatcctgaaaatgagctcggcccagggcaggtttaaggcattttccacctgtgcatcccacctcactgccatctgcctcttctttggcacaacactttttatgtacctgcgccccaggtccagctactccttgacccaggaccgcacagttgctgtcatctacacagtggtgatcccagtgctgaaccccctcatgtactctttgagaaacaaggatgtgaagaaagctttaataaaggtttggggtaggaaaacaatggaatga

SEQ ID NO: 183 - protein, 314 aa, Homo sapiens
MRGFNKTTVVTQFILVGFSSLGELQLLLFVIFLLLYLTILVANVTIMAVIRFSWTLHTPMYGFLFILSFSESCYTFVIIPQLLVHLLSDTKTISFMACATQLFFFLGFACTNCLLIAVMGYDRYVAICHPLRYTLIINKRLGLELISLSGATGFFIALVATNLICDMRFCGPNRVNHYFCDMAPVIKLACTDTHVKELALFSLSILVIMVPFLLILISYGFIVNTILKIPSAEGKKAFVTCASHLTVVFVHYGCASIIYLRPKSKSASDKDQLVAVTYTVVTPLLNPLVYSLRNKEVKTALKRVLGMPVATKMS

SEQ ID NO: 184 - DNA, 945 bp, Homo sapiens
atgcgaggtttcaacaaaaccactgtggttacacagttcatcctggtgggtttctccagcctgggggagctccagctgctgctttttgtcatctttcttctcctatacttgacaatcctggtggccaatgtgaccatcatggccgttattcgcttcagctggactctccacactcccatgtatggctttctattcatcctttcattttctgagtcctgctacacttttgtcatcatccctcagctgctggtccacctgctctcagacaccaagaccatctccttcatggcctgtgccacccagctgttctttttccttggctttgcttgcaccaactgcctcctcattgctgtgatgggatatgatcgctatgtagcaatttgtcaccctctgaggtacacactcatcataaacaaaaggctggggttggagttgatttctctctcaggagccacaggtttctttattgctttggtggccaccaacctcatttgtgacatgcgtttttgtggccccaacagggttaaccactatttctgtgacatggcacctgttatcaagttagcctgcactgacacccatgtgaaagagctggctttatttagcctcagcatcctggtaattatggtgccttttctgttaattctcatatcctatggcttcatagttaacaccatcctgaagatcccctcagctgagggcaagaaggcctttgtcacctgtgcctcacatctcactgtggtctttgtccactatggctgtgcctctatcatctatctgcggcccaagtccaagtctgcctcagacaaggatcagttggtggcagtgacctacacagtggttactcccttacttaatcctcttgtctacagtctgaggaacaaagaggtaaaaactgcattgaaaagagttcttggaatgcctgtggcaaccaagatgagctaa

SEQ ID NO: 185 - protein, 312 aa, Homo sapiens
MERVNETVVREVIFLGFSSLARLQQLLFVIFLLLYLFTLGTNAIIISTIVLDRALHIPMYFFLAILSCSEICYTFIIVPKMLVDLLSQKKTISFLGCAIQMFSFLFLGCSHSFLLAVMGYDRYIAICNPLRYSVLMGHGVCMGLVAAACACGFTVAQIITSLVFHLPFYSSNQLHHFFCDIAPVLKLASHHNHFSQIVIFMLCTLVLAIPLLLILVSYVHILSAILQFPSTLGRCKAFSTCVSHLIIVTVHYGCASFIYLRPQSNYSSSQDALISVSYTIITPLFNPMIYSLRNKEFKSALCKIVRRTISLL

SEQ ID NO: 186 - DNA, 939 bp, Homo sapiens
atggagcgggtcaatgagactgtggtgagagaggtcatcttcctcggcttctcatccctggccaggctgcagcagctgctctttgttatcttcctgctcctctacctgttcactctgggcaccaatgcaatcatcatttccaccattgtcctggacagggcccttcatatccccatgtacttcttccttgccatcctctcttgctctgagatttgctacaccttcatcattgtacccaagatgctggttgacctgctgtcccagaagaagaccatttctttcctgggctgtgccatccaaatgttttccttcctcttccttggctgctctcactcctttctgctggcagtcatgggttatgatcgttacatagccatctgtaacccactgcgctactcagtgctaatgggacatggggtgtgtatgggactagtggctgctgcctgtgcctgtggcttcactgttgcacagatcatcacatccttggtatttcacctgcctttttattcctccaatcaactacatcacttcttctgtgacattgctcctgtcctcaagctggcatctcaccataaccactttagtcagattgtcatcttcatgctctgtacattggtcctggctatccccttattgttgatcttggtgtcctatgttcacatcctctctgccatacttcagtttccttccacactgggtaggtgcaaagctttttctacctgtgtatctcacctcattattgtcactgtccactatggctgtgcctcctttatctacttaaggcctcagtccaactactcctcaagccaggatgctctaatatcagtatcctacactattataactccattgttcaacccaatgatttatagcttgagaaataaagagttcaaatcagctctttgtaaaattgtgagaagaacaatttccctgttgtaa

SEQ ID NO: 187 - protein, 312 aa, Homo sapiens
MDTGNWSQVAEFIILGFPHLQGVQIYLFLLLLLIYLMTVLGNLLIFLVVCLDSRLHTPMYHFVSILSFSELGYTAATIPKMLANLLSEKKTISFSGCLLQIYFFHSLGATECYLLTAMAYDRYLAICRPLHYPTLMTPTLCAEIAIGCWLGGLAGPVVEISLISRLPFCGPNRIQHVFCDFPPVLSLACTDTSINVLVDFVINSCKILATFLLILCSYVQIICTVLRIPSAAGKRKAISTCASHFTVVLIFYGSILSMYVQLKKSYSLDYDQALAVVYSVLTPFLNPFIYSLRNKEIKEAVRRQLKRIGILA

SEQ ID NO: 188 - DNA, 939 bp, Homo sapiens
atggacacagggaactggagccaggtagcagaattcatcatcttgggcttcccccatctccagggtgtccagatttatctcttcctcttgttgcttctcatttacctcatgactgtgttgggaaacctgctgatattcctggtggtctgcctggactcccggcttcacacacccatgtaccactttgtcagcattctctccttctcagagcttggctatacagctgccaccatccctaagatgctggcaaacttgctcagtgagaaaaagaccatttcattctctgggtgtctcctgcagatctatttctttcactcccttggagcgactgagtgctatctcctgacagctatggcctacgataggtatttagccatctgccggcccctccactacccaaccctcatgaccccaacactttgtgcagagattgccattggctgttggttgggaggcttggctgggccagtagttgaaatttccttgatttcacgcctcccattctgtggccccaatcgcattcagcacgtcttttgtgacttccctcctgtgctgagtttggcttgcactgatacgtctataaatgtcctagtagattttgttataaattcctgcaagatcctagccaccttcctgctgatcctctgctcctatgtgcagatcatctgcacagtgctcagaattccctcagctgccggcaagaggaaggccatctccacgtgtgcctcccacttcactgtggttctcatcttctatgggagcatcctttccatgtatgtgcagctgaagaagagctactcactggactatgaccaggccctggcagtggtctactcagtgctcacacccttcctcaaccccttcatctacagcttgcgcaacaaggagatcaaggaggctgtgaggaggcagctaaagagaattgggatattggcatga

SEQ ID NO: 189 - protein, 319 aa, Homo sapiens
MPVGKLVFNQSEPTEFVFRAFTTATEFQVLLFLLFLLLYLMILCGNTAIIWVVCTHSTLRTPMYFFLSNLSFLELCYTTVVVPLMLSNILGAQKPISLAGCGAQMFFFVTLGSTDCFLLAIMAYDRYVAICHPLHYTLIMTRELCTQMLGGALGLALFPSLQLTALIFTLPFCGHHQEINHFLCDVPPVLRLACADIRVHQAVLYVVSILVLTIPFLLICVSYVFITCAILSIRSAEGRRRAFSTCSFHLTVVLLQYGCCSLVYLRPRSSTSEDEDSQIALVYTFVTPLLNPLLYSLRNKDVKGALRSAIIRKAASDAN

SEQ ID NO: 190 - DNA, 960 bp, Homo sapiens
atgcctgtggggaaacttgtcttcaaccagtctgagcccactgagtttgtgttccgtgcgttcaccacagccactgaattccaggttcttctcttccttctcttcctcctcctctacttgatgatcctctgtggcaacacagccatcatctgggtggtgtgcacacacagcaccctccgcaccccgatgtatttcttcctgtccaacctgtctttcctggaactctgctacaccaccgtggtagtacccttgatgctttccaacattttgggggcccagaagcccatttcgttggctggatgtggggcccaaatgttcttctttgtcaccctcggcagcacggactgtttcctcttggcgatcatggcctatgaccgctatgtggctatctgccacccgctgcactacaccctcatcatgacccgcgagctgtgcacgcagatgctgggtggggccctgggcctggccctcttcccctccctgcagctcaccgccttaatcttcaccctgcccttttgcggccaccaccaggaaatcaaccacttcctctgcgatgtgcctcccgtcctgcgcctggcctgcgctgacatccgcgtgcaccaggctgtcctctatgtcgtgagcatcctcgtgctgaccatccccttcctgctcatctgcgtctcctacgtgttcatcacctgtgccatcctgagcatccgttctgccgagggccgccgccgggccttctccacctgctccttccacctcaccgtggtcctgctgcagtatggctgctgcagcctcgtgtacctgcgtcctcggtccagcacctcagaggatgaggacagccaaatcgcgttggtctacacctttgtcacccccttactcaaccctttgctttacagccttaggaacaaggatgtcaaaggtgctctgaggagtgccattatccgtaaagcagcctctgacgccaactga

SEQ ID NO: 191 - protein, 310 aa, Homo sapiens
MAEMNLTLVTEFLLIAFTEYPEWALPLFLLLLFMYLITVLGNLEMIILILMDHQLHAPMYFLLSHLAFMDVCYSSITVPQMLAVLLEHGAALSYTRCAAQFFLFTFFGSIDCYLLALMAYDRYLAVCQPLLYVTILTQQARLSLVAGAYVAGLISALVRTVSAFTLSFCGTSEIDFIFCDLPPLLKLTCGESYTQEVLIIMFAIFVIPASMVVILVSYLFIIVAIMGIPAGSQAKTFSTCTSHLTAVSLFFGTLIFMYLRGNSDQSSEKNRVVSVLYTEVIPMLNPLIYSLRNKEVKEALRKILNRAKLS

SEQ ID NO: 192 - DNA, 933 bp, Homo sapiens
atggcagagatgaacctcaccttggtgaccgagttcctccttattgcattcactgaatatcctgaatgggcactccctctcttcctcttgttattatttatgtatctcatcaccgtattggggaacttagagatgattattctgatcctcatggatcaccagctccacgctccaatgtatttccttctgagtcacctcgctttcatggacgtctgctactcatctatcactgtcccccagatgctggcagtgctgctggagcatggggcagctttatcttacacacgctgtgctgctcagttctttctgttcaccttctttggttccatcgactgctacctcttggccctcatggcctatgaccgctacttggctgtgtgccagcccctgctttatgtcaccatcctgacacagcaggcccgcttgagtcttgtggctggggcttacgttgctggtctcatcagtgccttggtgcggacagtctcagccttcactctctccttctgtggaaccagtgagattgactttattttctgtgacctccctcctctgttaaagttgacctgtggggagagctacactcaagaagtgctgattattatgtttgccatttttgtcatccctgcttccatggtggtgatcttggtgtcctacctgtttatcatcgtggccatcatggggatccctgctggaagccaggccaagaccttctccacctgcacctcccacctcactgctgtgtcactcttctttggtaccctcatcttcatgtacttgagaggtaactcagatcagtcttcggagaagaatcgggtagtgtctgtgctttacacagaggtcatccccatgttgaatcccctcatctacagcctgaggaacaaggaagtgaaggaggccctgagaaaaattctcaatagagccaagttgtcctaa

SEQ ID NO: 193 - protein, 315 aa, Homo sapiens
MQGLNHTSVSEFILVGFSAFPHLQLMLFLLFLLMYLFTLLGNLLIMATVWSERSLHMPMYLFLCALSITEILYTVAIIPRMLADLLSTQRSIAFLACASQMFFSFSFGFTHSFLLTVMGYDRYVAICHPLRYNVLMSLRGCTCRVGCSWAGGLVMGMVVTSAIFHLAFCGHKEIHHFFCHVPPLLKLACGDDVLVVAKGVGLVCITALLGCFLLILLSYAFIVAAILKIPSAEGRNKAFSTCASHLTVVVVHYGFASVIYLKPKGPQSPEGDTLMGITYTVLTPFLSPIIFSLRNKELKVAMKKTCFTKLFPQNC

SEQ ID NO: 194 - DNA, 948 bp, Homo sapiens
atgcaggggctaaaccacacctccgtgtctgaattcatcctcgttggcttctctgccttcccccacctccagctgatgctcttcctgctgttcctgctgatgtacctgttcacgctgctgggcaacctgctcatcatggccactgtctggagcgagcgcagcctccacatgcccatgtacctcttcctgtgtgccctctccatcaccgagatcctctacaccgtggccatcatcccgcgcatgctggccgacctgctgtccacccagcgctccatcgccttcctggcctgtgccagtcagatgttcttctccttcagcttcggcttcacccactccttcctgctcactgtcatgggctacgaccgctacgtggccatctgccaccccctgcgttacaacgtgctcatgagcctgcggggctgcacctgccgggtgggctgctcctgggctggtggcttggtcatggggatggtggtgacctcggccattttccacctcgccttctgtggacacaaggagatccaccatttcttctgccacgtgccacctctgttgaagttggcctgtggagatgatgtgctggtggtggccaaaggcgtgggcttggtgtgtatcacggccctgctgggctgttttctcctcatcctcctctcctatgccttcatcgtggccgccatcttgaagatcccttctgctgaaggtcggaacaaggccttctccacctgtgcctctcacctcactgtggtggtcgtgcactatggctttgcctccgtcatttacctgaagcccaaaggtccccagtctccggaaggagacaccttgatgggcatcacctacacggtcctcacacccttcctcagccccatcatcttcagcctcaggaacaaggagctgaaggtcgccatgaagaagacttgcttcaccaaactctttccacagaactgctga

SEQ ID NO: 195 - protein, 313 aa, Homo sapiens
METANYTKVTEFVLTGLSQTPEVQLVLFVIFLSFYLFILPGNILIICTISLDPHLTSPMYFLLANLAFLDIWYSSITAPEMLIDFFVERKIISFDGCIAQLFFLHFAGASEMFLLTVMAFDLYTAICRPLHYATIMNQRLCCILVALSWRGGFIHSIIQVALIVRLPFCGPNELDSYFCDITQVVRIACANTFPEELVMICSSGLISVVCLIALLMSYAFLLALFKKLSGSGENTNRAMSTCYSHITIVVLMFGPSIYIYARPFDSFSLDKVVSVFNTLIFPLRNPIIYTLRNKEVKAAMRKLVTKYILCKEK

SEQ ID NO: 196 - DNA, 942 bp, Homo sapiens
atggaaactgcaaattacaccaaggtgacagaatttgttctcactggcctatcccagactccagaggtccaactagtcctatttgttatatttctatccttctatttgttcatcctaccaggaaatatccttatcatttgcaccatcagtctagaccctcatctgacctctcctatgtatttcctgttggctaatctggccttccttgatatttggtactcttccattacagcccctgaaatgctcatagacttctttgtggagaggaagataatttcttttgatggatgcattgcacagctcttcttcttacactttgctggggcttcggagatgttcttgctcacagtgatggcctttgacctctacactgctatctgccgacccctccactatgctaccatcatgaatcaacgtctctgctgtatcctggtggctctctcctggagggggggcttcattcattctatcatacaggtggctctcattgttcgacttcctttctgtgggcccaatgagttagacagttacttctgtgacatcacacaggttgtccggattgcctgtgccaacaccttcccagaggagttagtgatgatctgtagtagtggtctgatctctgtggtgtgtttgattgctctgttaatgtcctatgccttccttctggccttgttcaagaaactttcaggctcaggtgagaataccaacagggccatgtccacctgctattcccacattaccattgtggtgctaatgtttgggccatccatctacatttatgctcgcccatttgactcgttttccctagataaagtggtgtctgtgttcaatactttaatattccctttacgtaatcccattatttacacattgagaaacaaggaagtaaaggcagccatgaggaagttggtcaccaaatatattttgtgtaaagagaagtga

SEQ ID NO: 197 - protein, 316 aa, Homo sapiens
MELWNFTLGSGFILVGILNDSGSPELLCATITILYLLALISNGLLLLAITMEARLHMPMYLLLGQLSLMDLLFTSVVTPKALADFLRRENTISFGGCALQMFLALTMGGAEDLLLAFMAYDRYVAICHPLTYMTLMSSRACWLMVATSWILASLSALIYTVYTMHYPFCRAQEIRHLLCEIPHLLKVACADTSRYELMVYVMGVTFLIPSLAAILASYTQILLTVLHMPSNEGRKKALVTCSSHLTVVGMFYGAATFMYVLPSSFHSTRQDNIISVFYTIVTPALNPLIYSLRNKEVMRALRRVLGKYMLPAHSTL

SEQ ID NO: 198 - DNA, 951 bp, Homo sapiens
atggagctctggaacttcaccttgggaagtggcttcattttggtggggattctgaatgacagtgggtctcctgaactgctctgtgctacaattacaatcctatacttgttggccctgatcagcaatggcctactgctcctggctatcaccatggaagcccggctccacatgcccatgtacctcctgcttgggcagctctctctcatggacctcctgttcacatctgttgtcactcccaaggcccttgcggactttctgcgcagagaaaacaccatctcctttggaggctgtgcccttcagatgttcctggcactgacaatgggtggtgctgaggacctcctactggccttcatggcctatgacaggtatgtggccatttgtcatcctctgacatacatgaccctcatgagctcaagagcctgctggctcatggtggccacgtcctggatcctggcatccctaagtgccctaatatataccgtgtataccatgcactatcccttctgcagggcccaggagatcaggcatcttctctgtgagatcccacacttgctgaaggtggcctgtgctgatacctccagatatgagctcatggtatatgtgatgggtgtgaccttcctgattccctctcttgctgctatactggcctcctatacacaaattctactcactgtgctccatatgccatcaaatgaggggaggaagaaagcccttgtcacctgctcttcccacctgactgtggttgggatgttctatggagctgccacattcatgtatgtcttgcccagttccttccacagcaccagacaagacaacatcatctctgttttctacacaattgtcactccagccctgaatccactcatctacagcctgaggaataaggaggtcatgcgggccttgaggagggtcctgggaaaatacatgctgccagcacactccacgctctag

SEQ ID NO: 199 - protein, 330 aa, Homo sapiens
MCSFFLCQTGKQAKISMGEENQTFVSKFIFLGLSQDLQTQILLFILFLIIYLLTVLGNQLIIILIFLDSRLHTPMYFFLRNLSFADLCFSTSIVPQVLVHFLVKRKTISFYGCMTQIIVFLLVGCTECALLAVMSYDRYVAVCKPLYYSTIMTQRVCLWLSFRSWASGALVSLVDTSFTFHLPYWGQNIINHYFCEPPALLKLASIDTYSTEMAIFSMGVVILLAPVSLILGSYWNIISTVIQMQSGEGRLKAFSTCGSHLIVVVLFYGSGIFTYMRPNSKTTKELDKMISVFYTAVTPMLNPIIYSLRNKDVKGALRKLVGRKCFSHRQ

SEQ ID NO: 200 - DNA, 993 bp, Homo sapiens
atgtgttcttttttcttgtgccaaacaggtaaacaggcaaaaatatcaatgggagaagaaaaccaaacctttgtgtccaagtttatcttcctgggtctttcacaggacttgcagacccagatcctgctatttatccttttcctcatcatttatctgctgaccgtgcttggaaaccagctcatcatcattctcatcttcctggattctcgccttcacactcccatgtatttttttcttagaaatctctcctttgcagatctctgtttctctactagcattgtccctcaagtgttggttcacttcttggtaaagaggaaaaccatttctttttatgggtgtatgacacagataattgtctttcttctggttgggtgtacagagtgtgcgctgctggcagtgatgtcctatgaccggtatgtggctgtctgcaagcccctgtactactctaccatcatgacacaacgggtgtgtctctggctgtccttcaggtcctgggccagtggggcactagtgtctttagtagataccagctttactttccatcttccctactggggacagaatataatcaatcactacttttgtgaacctcctgccctcctgaagctggcttccatagacacttacagcacagaaatggccatcttttcaatgggcgtggtaatcctcctggcccctgtctccctgattcttggttcttattggaatattatctccactgttatccagatgcagtctggggaagggagactcaaggctttttccacctgtggctcccatcttattgttgttgtcctcttctatgggtcaggaatattcacctacatgcgaccaaactccaagactacaaaagaactggataaaatgatatctgtgttctatacagcggtgactccaatgttgaaccccataatttatagcttgaggaacaaagatgtcaaaggggctctcaggaaactagttgggagaaagtgcttctctcataggcagtga

SEQ ID NO: 201 - protein, 317 aa, Homo sapiens
MLRNGSIVTEFILVGFQQSSTSTRALLFALFLALYSLTMAMNGLIIFITSWTDPKLNSPMYFFLGHLSLLDVCFITTTIPQMLIHLVVRDHIVSFVCCMTQMYFVFCVGVAECILLAFMAYDRYVAICYPLNYVPIISQKVCVRLVGTAWFFGLINGIFLEYISFREPFRRDNHIESFFCEAPIVIGLSCGDPQFSLWAIFADAIVVILSPMVLTVTSYVHILATILSKASSSGRGKTFSTCASHLTVVIFLYTSAMFSYMNPHSTHGPDKDKPFSLLYTIITPMCNPIIYSFRNKEIKEAMVRALGRTRLAQPQSV

SEQ ID NO: 202 - DNA, 954 bp, Homo sapiens
atgctaaggaatggcagcatagtgacggaatttatcctcgtgggctttcagcagagctccacttccacacgagcattgctctttgccctcttcttggccctctacagcctcaccatggccatgaatggcctcatcatctttatcacctcctggacagaccccaagctcaacagccccatgtacttcttcctcggccatctgtctctcctggatgtctgcttcatcaccactaccatcccacagatgttgatccacctcgtggtcagggaccacattgtctcctttgtatgttgcatgacccagatgtactttgtcttctgtgttggtgtggccgagtgcatcctcttggctttcatggcctatgaccgttatgttgctatctgctacccacttaactatgtcccgatcataagccagaaggtctgtgtcaggcttgtgggaactgcctggttctttgggctgatcaatggcatctttctcgagtatatttcattccgagagcccttccgcagagacaaccacatagaaagcttcttctgtgaggcccccatagtgattggcctctcttgtggggaccctcagtttagtctgtgggcaatctttgccgatgccatcgtggtaattctcagccccatggtgctcactgtcacttcctatgtgcacatcctggccaccatcctcagcaaagcctcctcctcaggtcgggggaagactttctctacttgtgcctctcacctgactgtggtcatctttctctacacttcagctatgttctcttacatgaacccccacagcacacatgggcctgacaaagacaaacctttctccctcctgtacaccatcattacccccatgtgcaaccccatcatttatagtttccgcaacaaggaaattaaggaggccatggtgagggcacttggaagaaccaggctggcccagccacagtctgtctag

SEQ ID NO: 203 - protein, 316 aa, Homo sapiens
MKIANNTVVTEFILLGLTQSQDIQLLVFVLILIFYLIILPGNFLIIFTIRSDPGLTAPLYLFLGNLAFLDASYSFIVAPRMLVDFLSEKKVISYRGCITQLFFLHFLGGGEGLLLVVMAFDRYIAICRPLHCSTVMNPRACYAMMLALWLGGFVHSIIQVVLILRLPFCGPNQLDNFFCDVRQVIKLACTDMFVVELLMVFNSGLMTLLCFLGLLASYAVILCHVRRAASEGKNKAMSTCTTRVIIILLMFGPAIFIYMCPFRALPADKMVSLFHTVIFPLMNPMIYTLRNQEVKTSMKRLLSRHVVCQVDFIIRN

SEQ ID NO: 204 - DNA, 951 bp, Homo sapiens
atgaagatagcaaacaacacagtagtgacagaatttatcctccttggtctgactcagtctcaagatattcagctcttggtctttgtgctgatcttaattttctaccttatcatcctccctggaaattttctcattattttcaccataaggtcagaccctgggctcacagcccccctctatttatttctgggcaacttggccttcctggatgcatcctactccttcattgtggctcccaggatgttggtggacttcctctctgagaaaaaggtaatctcctacagaggctgcatcactcagctctttttcttgcacttccttggaggaggggagggattactccttgttgtgatggcctttgaccgctacatcgccatctgccggcctctgcactgttcaactgtcatgaaccctagagcctgctatgcaatgatgttggctctgtggcttgggggttttgtccactccattatccaggtggtcctcatcctccgcttgcctttttgtggcccaaaccagctggacaacttcttctgtgatgtccgacaggtcatcaagctggcttgcaccgacatgtttgtggtggagcttctaatggtcttcaacagtggcctgatgacactcctgtgctttctggggcttctggcttcctatgcagtcatcctctgccatgttcgtagggcagcttctgaagggaagaacaaggccatgtccacgtgcaccactcgtgtcattattatacttcttatgtttggacctgctatcttcatctacatgtgccctttcagggccttaccagctgacaagatggtttctctctttcacacagtgatctttccattgatgaatcctatgatttatacccttcgcaaccaggaagtgaaaacttccatgaagaggttattgagtcgacatgtagtctgtcaagtggattttataataagaaactga

SEQ ID NO: 205 - protein, 338 aa, Homo sapiens
MCYIYLIFKEWTLIFYFSLLLFLQITPAIMANLTIVTEFILMGFSTNKNMCILHSILFLLIYLCALMGNVLIIMITTLDHHLHTPVYFFLKNLSFLDLCLISVTAPKSIANSLIHNNSISFLGCVSQVFLLLSSASAELLLLTVMSFDRYTAICHPLHYDVIMDRSTCVQRATVSWLYGGLIAVMHTAGTFSLSYCGSNMVHQFFCDIPQLLAISCSENLIREIALILINVVLDFCCFIVIIITYVHVFSTVKKIPSTEGQSKAYSICLPHLLVVLFLSTGFIAYLKPASESPSILDAVISVFYTMLPPTFNPIIYSLRNKAIKVALGMLIKGKLTKK

SEQ ID NO: 206 - DNA, 1017 bp, Homo sapiens
atgtgttatatatatttaatatttaaagagtggacattgatattttacttcagtcttctccttttcctgcagattactcctgcaataatggcaaatctcacaatcgtgactgaatttatccttatggggttttctaccaataaaaatatgtgcattttgcattcgattctcttcttgttgatttatttgtgtgccctgatggggaatgtcctcattatcatgatcacaactttggaccatcatctccacacccccgtgtatttcttcttgaagaatctatctttcttggatctctgccttatttcagtcacggctcccaaatctatcgccaattctttgatacacaacaactccatttcattccttggctgtgtttcccaggtctttttgttgctttcttcagcatctgcagagctgctcctcctcacggtgatgtcctttgaccgctatactgctatatgtcaccctctgcactatgatgtcatcatggacaggagcacctgtgtccaaagagccactgtgtcttggctgtatgggggtctgattgctgtgatgcacacagctggcaccttctccttatcctactgtgggtccaacatggtccatcagttcttctgtgacattccccagttattagctatttcttgctcagaaaatttaataagagaaattgcactcatccttattaatgtagttttggatttctgctgttttattgtcatcatcattacctatgtccacgtcttctctacagtcaagaagatcccttccacagaaggccagtcaaaagcctactctatttgccttccacacttgctggttgtgttatttctttccactggattcattgcttatctgaagccagcttcagagtctccttctattttggatgctgtaatttctgtgttctacactatgctgcccccaacctttaatcccattatatacagtttgagaaacaaggccataaaggtggctctggggatgttgataaagggaaagctcaccaaaaagtaa

SEQ ID NO: 207 - protein, 342 aa, Homo sapiens
MKFWHGFSSHLNPMFSSFLLYLSLPWINTTIQAWLNLCSLALPVWAMSGAGFLSCCYWHTCSPSVVTCSSSQSSDWMQLCTHLCTTLSVFFPSWSCGIQLPLSLRCCLIFSVRRKPFLLQDASFRPTSSTPWGACECYLLTAMAYDRYLAICRPLHYPIIMTTTLCAKMAAACWTCGFLCPISEVILASQLPFCAYNEIQHIFCDFPPLLSLACKDTSANILVDFAINAFIILITFFFIMISYARIIGAVLKIKTASGRKKAFSTCASHLAVVLIFFGSIIFMYVRLKKSYSLTLDRTLAIVYSVLTPMVNPIIYSLRNKEIIKAIKRTIFQKGDKASLAHL

SEQ ID NO: 208 - DNA, 1053 bp, Homo sapiens; identical to SEQ ID NO: 98

SEQ ID NO: 209 - protein, 309 aa, Homo sapiens
MERINHTSSVSEFILLGLSSRPEDQKTLFVLFLIVYLVTITGNLLIILAIRFNPHLQTPMYFFLSFLSLTDICFTTSVVPKMLMNFLSEKKTISYAGCLTQMYFLYALGNSDSCLLAVMAFDRYVAVCDPFHYVTTMSHHHCVLLVAFSCSFPHLHSLLHTLLLNRLTFCDSNVIHHFLCDLSPVLKLSCSSIFVNEIVQMTEAPIVLVTRFLCIAFSYIRILTTVLKIPSTSGKRKAFSTCGFYLTVVTLFYGSIFCVYLQPPSTYAVKDHVATIVYTVLSSMLNPFIYSLRNKDLKQGLRKLMSKRS

SEQ ID NO: 210 - DNA, 930 bp, Homo sapiens
atggaaagaatcaaccacaccagcagtgtctccgagtttatcctcctgggactctcctcccggcctgaggaccaaaagacactctttgttctcttcctcatcgtgtacctggtcaccataacagggaacctgctcatcatcctggccattcgcttcaacccccatcttcagacccctatgtatttcttcttgagttttctgtctctcactgatatttgctttacaacaagcgttgtccccaagatgctgatgaacttcctgtcagaaaagaagaccatctcctatgctgggtgtctgacacagatgtattttctctatgccttgggcaacagtgacagctgccttctggcagtcatggcctttgaccgctatgtggccgtctgtgaccctttccactatgtcaccaccatgagccaccaccactgtgtcctgctggtggccttctcctgctcatttcctcacctccactcactcctgcacacacttctgctgaatcgtctcaccttctgtgactccaatgttatccaccactttctctgtgacctcagccctgtgctgaaattgtcctgctcttccatatttgtcaatgaaattgtgcagatgacagaagcacctattgttttggtgactcgttttctctgcattgctttctcttatatacgaatcctcactacagttctcaagattccctctacttctgggaaacgcaaagccttctccacctgtggtttttacctcaccgtggtgacgctcttttatggaagcatcttctgtgtctatttacagcccccatccacctacgctgtcaaggaccacgtggcaacaattgtttacacagttttgtcatccatgctcaatccttttatctacagcctgagaaacaaagacctgaaacagggcctgaggaagcttatgagcaagagatcctag

SEQ ID NO: 211 - protein, 330 aa, Homo sapiens
MEGFYLRRSHELQGMGKPGRVNQTTVSDFLLLGLSEWPEEQPLLFGIFLGMYLVTMVGNLLIILAISSDPHLHTPMYFFLANLSLTDACFTSASIPKMLANIHTQSQIISYSGCLAQLYFLLMFGGLDNCLLAVMAYDRYVAICQPLHYSTSMSPQLCALMLGVCWVLTNCPALMHTLLLTRVAFCAQKAIPHFYCDPSALLKLACSDTHVNELMIITMGLLFLTVPLLLIVFSYVRIFWAVFVISSPGGRWKAFSTCGSHLTVVLLFYGSLMGVYLLPPSTYSTERESRAAVLYMVIIPTLNPFIYSLRNRDMKEALGKLFVSGKTFFL

SEQ ID NO: 212 - DNA, 993 bp, Homo sapiens
atggaaggtttttatctgcgcagatcacacgaactacaagggatgggaaaaccaggcagagtgaaccaaaccactgtttcagacttcctccttctaggactctctgagtggccagaggagcagcctcttctgtttggcatcttccttggcatgtacctggtcaccatggtggggaacctgctcattatcctggccatcagctctgacccacacctccatactcccatgtacttctttctggccaacctgtcattaactgatgcctgtttcacttctgcctccatccccaaaatgctggccaacattcatacccagagtcagatcatctcgtattctgggtgtcttgcacagctatatttcctccttatgtttggtggccttgacaactgcctgctggctgtgatggcatatgaccgctatgtggccatctgccaaccactccattacagcacatctatgagtccccagctctgtgcactaatgctgggtgtgtgctgggtgctaaccaactgtcctgccctgatgcacacactgttgctgacccgcgtggctttctgtgcccagaaagccatccctcatttctattgtgatcctagtgctctcctgaagcttgcctgctcagatacccatgtaaacgagctgatgatcatcaccatgggcttgctgttcctcactgttcccctcctgctgatcgtcttctcctatgtccgcattttctgggctgtgtttgtcatctcatctcctggagggagatggaaggccttctctacctgtggttctcatctcacggtggttctgctcttctatgggtctcttatgggtgtgtatttacttcctccatcaacttactctacagagagggaaagtagggctgctgttctctatatggtgattattcccacgctaaacccattcatttatagcttgaggaacagagacatgaaggaggctttgggtaaactttttgtcagtggaaaaacattctttttatga

SEQ ID NO: 213 - protein, 312 aa, Homo sapiens
MDEANHSVVSEFVFLGLSDSRKIQLLLFLFFSVFYVSSLMGNLLIVLTVTSDPRLQSPMYFLLANLSIINLVFCSSTAPKMIYDLFRKHKTISFGGCVVQIFFIHAVGGTEMVLLIAMAFDRYVAICKPLHYLTIMNPQRCILFLVISWIIGIIHSVIQLAFVVDLLFCGPNELDSFFCDLPRFIKLACIETYTLGFMVTANSGFISLASFLILIISYIFILVTVQKKSSGGIFKAFSMLSAHVIVVVLVFGPLIFFYIFPFPTSHLDKFLAIFDAVITPVLNPVIYTFRNKEMMVAMRRRCSQFVNYSKIF

SEQ ID NO: 214 - DNA, 939 bp, Homo sapiens
atggatgaagccaatcactctgtggtctctgagtttgtgttcctgggactctctgactcgcggaagatccagctcctcctcttcctctttttctcagtgttctatgtatcaagcctgatgggaaatctcctcattgtgctaactgtgacctctgaccctcgtttacagtcccccatgtacttcctgctggccaacctttccatcatcaatttggtattttgttcctccacagctcccaagatgatttatgaccttttcaggaagcacaagaccatctcttttgggggctgtgtagttcagatcttctttatccatgcagttgggggaactgagatggtgctgctcatagccatggcttttgaccgatatgtggccatatgtaagcctctccactacctgaccatcatgaacccacaaaggtgcattttgtttttagtcatttcctggattataggtattattcactcagtgattcagttggcttttgttgtagacctgctgttctgtggccctaatgaattagatagtttcttttgtgatcttcctcgatttatcaaactggcttgcatagagacctacacattgggattcatggttactgccaatagtggatttatttctctggcttcttttttaattctcataatctcttacatctttattttggtgactgttcagaaaaaatcttcaggtggtatattcaaggctttctctatgctgtcagctcatgtcattgtggtggttttggtctttgggccattaatctttttctatatttttccatttcccacatcacatcttgataaattccttgccatctttgatgcagttatcactcccgttttgaatccagtcatctatacttttagaaataaagagatgatggtggcaatgagaagacgatgctctcagtttgtgaattacagtaaaatcttttaa

SEQ ID NO: 215 - protein, 357 aa, Homo sapiens [sequence omitted]

SEQ ID NO: 216 - DNA, 1074 bp, Homo sapiens
atgaataacactattgtatttgtcataaaaatacaaatagaaaaaagtgacttgaaatatagagccatttcattgcaagaaatctcaaagatttcccttcttttctgggtccttctcttggtcatttctagacttttactagccatgacactaggaaacagcactgaagtcactgaattctatcttctgggatttggtgcccagcatgagttttggtgtatcctcttcattgtattccttctcatctatgtgacctccataatgggtaatagtggaataatcttactcatcaacacagattccagatttcaaacactcacgtacttttttctacaacatttggcttttgttgatatctgttacacttctgctatcactcccaagatgctccaaagcttcacagaagaaaagaatttgatattatttcagggctgtgtgatacaattcttagtttatgcaacatttgcaaccagtgactgttatctcctggctatgatggcagtggatccttatgttgccatctgtaagccccttcactatactgtaatcatgtcccgaacagtctgcatccgtttggtagctggttcatacatcatgggctcaataaatgcctctgtacaaacaggttttacatgttcactgtccttctgcaagtccaatagcatcaatcactttttctgtgatgttccccctattcttgctctttcatgctccaatgttgacatcaacatcatgctacttgttgtctttgtgggatctaacttgatattcactgggttggtcgtcatcttttcctacatctacatcatggccaccatcctgaaaatgtcttctagtgcaggaaggaaaaaatccttctcaacatgtgcttcccacctgaccgcagtcaccattttctatgggacactctcttacatgtatttgcagtctcattctaataattcccaggaaaatatgaaagtggcctttatattttatggcacagttattcccatgttaaatcctttaatctatagcttgagaaataaggaagtaaaagaagctttaaaagtgatagggaaaaagttattttaa

SEQ ID NO: 217 - protein, 324 aa, Homo sapiens
MNHMSASLKISNSSKFQVSEFILLGFPGIHSWQHWLSLPLALLYLSALAANTLILIIIWQNPSLQQPMYIFLGILCMVDMGLATTIIPKILAIFWFDAKVISLPECFAQIYAIHFFVGMESGILLCMAFDRYVAICHPLRYPSIVTSSLILKATLFMVLRNGLFVTPVPVLAAQRDYCSKNEIEHCLCSNLGVTSLACDDRRPNSICQLVLAWLGMGSDLSLIILSYILILYSVLRLNSAEAAAKALSTCSSHLTLILFFYTIVVVISVTHLTEMKATLIPVLLNVLHNIIPPSLNPTVYALQTKELRAAFQKVLFALTKEIRS

SEQ ID NO: 218 - DNA, 975 bp, Homo sapiens
atgaatcatatgtctgcatctctcaaaatctccaatagctccaaattccaggtctctgagttcatcctgctgggattcccgggcattcacagctggcaacactggctatctctgcccctggcactactgtatctctcagcacttgctgcaaacaccctcatcctcatcatcatctggcagaacccttctttacagcagcccatgtatattttccttggcatcctctgtatggtagacatgggtctggccactactatcatccctaagatcctggccatcttctggtttgatgccaaggttattagcctccctgagtgctttgctcagatttatgccattcacttctttgtgggcatggagtctggtatcctactctgcatggcttttgatagatatgtggctatttgtcaccctcttcgctatccatcaattgtcaccagttccttaatcttaaaagctaccctgttcatggtgctgagaaatggcttatttgtcactccagtgcctgtgcttgcagcacagcgtgattattgctccaagaatgaaattgaacactgcctgtgctctaaccttggggtcacaagcctggcttgtgatgacaggaggccaaacagcatttgccagttggttctggcatggcttggaatggggagtgatctaagtcttattatactgtcatatattttgattctgtactctgtacttagactgaactcagctgaagctgcagccaaggccctgagcacttgtagttcacatctcaccctcatccttttcttttacactattgttgtagtgatttcagtgactcatctgacagagatgaaggctactttgattccagttctacttaatgtgttgcacaacatcatccccccttccctcaaccctacagtttatgcacttcagaccaaagaacttagggcagccttccaaaaggtgctgtttgcccttacaaaagaaataagatcttag

SEQ ID NO: 219 - protein, 324 aa, Homo sapiens
MPLFNSLCWFPTIHVTPPSFILNGIPGLERVHVWISLPLCTMYIIFLVGNLGLVYLIYYEESLHHPMYFFFGHALSLIDLLTCTTTLPNALCIFWFSLKEINFNACLAQMFFVHGFTGVESGVLMLMALDRYIAICYPLRYATTLTNPIIAKAELATFLRGVLLMIPFPFLVKRLPFCQSNIISHTYCDHMSVVKLSCASIKVNVIYGLMVALLIGVFDICCISLSYTLILKAAISLSSSDARQKAFSTCTAHISAIIITYVPAFFTFFAHRFGGHTIPPSLHIIVANLYLLLPPTLNPIVYGVKTKQIRKSVIKFFQGDKGAG

SEQ ID NO: 220 - DNA, 975 bp, Homo sapiens
atgcctctatttaattcattatgctggtttccaacaattcatgtgactcctccatcttttattcttaatggaatacctggtctggaaagagtacatgtatggatctccctcccactctgcacaatgtacatcatcttccttgtggggaatcttggtcttgtgtacctcatttattatgaggagtccttacatcatccgatgtattttttttttggccatgctctctccctcattgacctccttacctgcaccaccactctacccaatgcactctgcatcttctggttcagtctcaaagaaattaacttcaatgcttgcttggcccagatgttctttgttcatgggttcacaggtgtggagtctggggtgctcatgctcatggctctagaccgctatatagccatttgctaccctttgcgttatgctaccacactcaccaaccctatcattgccaaggctgagcttgccaccttcctgaggggtgtattgctgatgattcctttcccattcttggttaagcgtttgcctttctgccaaagcaatattatctcccatacgtactgcgaccacatgtctgtagtaaagctatcttgtgccagcatcaaggtcaatgtaatctatggtctaatggttgctctcctgattggagtgtttgacatttgttgtatatctttgtcttacactttgatcctcaaggcagcgatcagcctctcttcatcagatgctcggcagaaggctttcagcacctgcactgcccatatatctgccatcatcatcacctatgttccagcattcttcactttctttgcccaccgttttgggggacacacaattcccccttctcttcacatcattgtggctaatctttatcttcttcttcccccaactctaaaccctattgtttatggagtaaagacaaaacagatacgcaagagtgtcataaagttcttccagggtgataagggtgcaggttga

SEQ ID NO: 221 - protein, 317 aa, Homo sapiens
MQPYTKNWTQVTEFVMMGFAGIHEAHLLFFILFLTMYLFTLVENLAIILVVGLDHRLRRPMYFFLTHLSCLEIWYTSVTVPKMLAGFIGVDGGKNISYAGCLSQLFIFTFLGATECFLLAAMAYDRYVAICMPLHYGAFVSWGTCIRLAAACWLVGFLTPILPIYLLSQLTFCGPNVIDHFSCDASPLLALSCSDVTWKETVDFLVSLAVLLASSMVIAVSYGNIVWTLLHIRSAAERWKAFSTCAAHLTVVSLFYGTLFFMYVQTKVTSSINFNKVVSVFYSVVTPMLNPLIYSLRNKEVKGALGRVFSLNFWKGQ

SEQ ID NO: 222 - DNA, 954 bp, Homo sapiens
atgcaaccatataccaaaaactggacccaggtaactgaatttgtcatgatgggctttgctggcatccatgaagcacacctcctcttcttcatactcttcctcaccatgtacctgttcaccttggtggagaatttggccatcattttagtggtgggtttggaccaccgactacggagacccatgtatttcttcctgacacacttgtcctgccttgaaatctggtacacttctgttacagtgcccaagatgctggctggttttattggggtggatggtggcaagaatatctcttatgctggttgcctatcccagctcttcatcttcacctttcttggggcaactgagtgtttcctactggctgccatggcctatgatcgttatgtggccatttgtatgcctctccactatggggcttttgtgtcctggggcacctgcatccgtctggcagctgcctgttggctggtaggtttcctcacacccatcttgccaatctacctcttgtctcagctaacattttgtggcccaaatgtcattgaccatttctcctgtgatgcctcacccttgctagccttgtcgtgctcagatgtcacttggaaggagactgtggatttcctggtgtctctggctgtgctactggcctcctctatggtcattgctgtgtcctatggcaacatcgtctggacactgctgcacatccgctcagctgctgagcgctggaaggccttctctacctgtgcagctcacctgactgtggtgagcctcttctatggcactcttttctttatgtatgtccagaccaaggtgacctcctccatcaacttcaacaaggtggtatctgtcttctactctgttgtcacgcccatgctcaatcctctcatctacagtcttaggaacaaggaagtgaagggagctctgggtcgagtcttttctctcaacttttggaagggacagtga

SEQ ID NO: 223 - protein, 309 aa, Homo sapiens
MKRKNFTEVSEFIFLGFSSFGKHQITLFVVFLTVYILTLVANIIIVTIICIDHHLHTPMYFFLSMLASSETVYTLVIVPRMLLSLIFHNQPISLAGCATQMFFFVILATNNCFLLTAMGYDRYVAICRPLRYTVIMSKGLCAQLVCGSFGIGLTMAVLHVTAMFNLPFCGTVVDHFFCDIYPVMKLSCIDTTINEIINYGVSSFVIFVPIGLIFISYVLVISSILQIASAEGRKKTFATCVSHLTVVIVHCGCASIAYLKPKSESSIEKDLVLSVTYTIITPLLNPVVYSLRNKEVKDALCRVVGRNIS

SEQ ID NO: 224 - DNA, 930 bp, Homo sapiens
atgaagagaaagaacttcacagaagtgtcagaattcattttcttgggattttctagctttggaaagcatcagataaccctctttgtggttttcctaactgtctacattttaactctggttgctaacatcatcattgtgactatcatctgcattgaccatcatctccacactcccatgtatttcttcctaagcatgctggctagttcagagacggtgtacacactggtcattgtgccacgaatgcttttgagcctcatttttcataaccaacctatctccttggcaggctgtgctacacaaatgttcttttttgttatcttggccactaataattgcttcctgcttactgcaatggggtatgaccgctatgtggccatctgcagacccctgagatacactgtcatcatgagcaagggactatgtgcccagctggtgtgtgggtcctttggcattggtctgactatggcagttctccatgtgacagccatgttcaatttgccgttctgtggcacagtggtagaccacttcttttgtgacatttacccagtcatgaaactttcttgcattgataccactatcaatgagataataaattatggtgtaagttcatttgtgatttttgtgcccataggcctgatatttatctcctatgtccttgtcatctcttccatccttcaaattgcctcagctgagggccggaagaagacctttgccacctgtgtctcccacctcactgtggttattgtccactgtggctgtgcctccattgcctacctcaagccgaagtcagaaagttcaatagaaaaagaccttgttctctcagtgacgtacaccatcatcactcccttgctgaaccctgttgtttacagtctgagaaacaaggaggtaaaggatgccctatgcagagttgtgggcagaaatatttcttaa

SEQ ID NO: 225 - protein, 318 aa, Homo sapiens
MEWENQTILVEFFLKGHSVHPRLELLFFVLIFIMYVVILLGNGTLILISILDPHLHTPMYFFLGNLSFLDICYTTTSIPSTLVSFLSERKTISFSGCAVQMFLGLAMGTTECVLLGMMAFDRYVAICNPLRYPIIMSKNAYVPMAVGSWFAGIVNSAVQTTFVVQLPFCRKNVINHFSCEILAVMKLACADISGNEFLMLVATILFTLMPLLLIVISYSLIISSILKIHSSEGRSKAFSTCSAHLTVVIIFYGTILFMYMKPKSKETLNSDDLDATDKIISMFYGVMTPMMNPLIYSLRNKDVKEAVKHLPNRRFFSK

SEQ ID NO: 226 - DNA, 957 bp, Homo sapiens
atggaatgggaaaaccaaaccattctggtggaattttttctgaagggacattctgttcacccaaggcttgagttactcttttttgtgctaatcttcataatgtatgtggtcatccttctggggaatggtactctcattttaatcagcatcttggaccctcaccttcacacccctatgtacttctttctggggaacctctccttcttggacatctgctacaccaccacctctattccctccacactagtgagcttcctttcagaaagaaagaccatttccttttctggctgtgcagtgcagatgttccttggcttggccatggggacaacagagtgtgtgcttctgggcatgatggcctttgaccgctatgtggctatctgcaaccctctgagatatcccatcatcatgagcaagaatgcctatgtacccatggctgttgggtcctggtttgcagggattgtcaactctgcagtacaaactacatttgtagtacaattgcctttctgcaggaagaatgtcatcaatcatttctcatgtgaaattctagctgtcatgaagttggcctgtgctgacatctcaggcaatgagttcctcatgcttgtggccacaatattgttcacattgatgccactgctcttgatagttatctcttactcattaatcatttccagcatcctcaagattcactcctctgaggggagaagcaaagctttctctacctgctcagcccatctgactgtggtcataatattctatgggaccatcctcttcatgtatatgaagcccaagtctaaagagacacttaattcagatgacttggatgctaccgacaaaattatatccatgttctatggggtgatgactcccatgatgaatcctttaatctacagtcttagaaacaaggatgtgaaagaggcagtaaaacacctaccgaacagaaggttctttagcaagtga

SEQ ID NO: 227 - protein, 346 aa, Homo sapiens
MYRFTDFDVSNISIYLNHVLFYTTQQAGDLEHMETRNYSAMTEFFLVGLSQYPELQLFLFLLCLIMYMIILLGNSLLIIITILDSRLHTPMYFFLGNLSFLDICYTSSSIPPMLIIFMSERKSISFIGCALQMVVSLGLGSTECVLLAVMAYDHYVAICNPLRYSIIMNGVLYVQMAAWSWIIGCLTSLLQTVLTMMLPFCGNNVIDHITCEILALLKLVCSDITINVLIMTVTNIVSLVILLLLIFISYVFILSSILRINCAEGRKKAFSTCSAHSIVVILFYGSALFMYMKPKSKNTNTSDEIIGLSYGVVSPMLNPIIYSLRNKEVKEAVKKVLSRHLHLLKM

SEQ ID NO: 228 - DNA, 1041 bp, Homo sapiens
atgtacagatttacagattttgatgtatcaaacatttcaatttacctgaatcatgtccttttctatactacccagcaggcaggtgacctagaacacatggagacaagaaattactctgccatgactgaattctttctggtggggctttcccaatatccagagctccagctttttctgttcctgctctgcctcatcatgtacatgataatcctcctgggaaatagcctcctcattatcatcaccatcttggattctcgcctccatactcccatgtatttctttcttggaaacctctcattcttggacatctgttacacatcctcatccattcctccaatgcttattatatttatgtctgagagaaaatccatctccttcattggctgtgctctgcagatggttgtgtcccttggcttgggctccactgagtgtgtcctcctggctgtgatggcctatgaccactatgtggccatctgcaacccactgaggtactccatcatcatgaacggagtgctgtatgtgcaaatggctgcatggtcctggatcataggctgtctgacctccctattgcaaacagttctgacaatgatgttgcctttctgtgggaataatgtcattgatcatattacctgtgaaattttggcccttctaaaacttgtttgttcagatatcaccatcaatgtgcttatcatgacagtgacaaatattgtttcactggtgattcttctactgttaattttcatctcctatgtgtttattctctcttccatcctgagaattaattgtgctgagggaagaaagaaagccttctctacctgttcagcgcactcgattgtggtcatcttattctacggttcagccctttttatgtacatgaaacccaagtcaaagaacactaatacatctgatgagattattgggctgtcttatggagtggtaagcccaatgttaaatcccatcatctatagcctcaggaataaagaggtcaaagaggctgtaaagaaagtcctgagcagacatctgcatttattgaaaatgtga

SEQ ID NO: 229 - protein, 307 aa, Homo sapiens
MNHSVVTEFIILGLTKKPELQGIIFLFFLIVYLVAFLGNMLIIIAKIYNNTLHTPMYVFLLTLAVVDIICTTSIIPKMLGTMLTSENTISYAGCMSQLFLFTWSLGAEMVLFTTMAYDRYVAICFPLHYSTVMNHHMCVALLSMVMAIAVTNSWVHTALIMRLTFCGPNTIDHFFCEIPPLLALSCSPVRINEVMVYVADITLAIGDFILTCISYGFIIVAILRIRTVEGKRKAFSTCSSHLTVVTLYYSPVIYTYIRPASSYTFERDKVVAALYTLVTPTLNPMVYSFQNREMQAGIRKVFAFLKH

SEQ ID NO: 230 - DNA, 924 bp, Homo sapiens
atgaatcacagcgttgtaactgagttcattattctgggcctcaccaaaaagcctgaactccagggaattatcttcctcttttttctcattgtctatcttgtggcttttctcggcaacatgctcatcatcattgccaaaatctataacaacaccttgcatacgcccatgtatgttttccttctgacactggctgttgtggacatcatctgcacaacaagcatcataccgaagatgctggggaccatgctaacatcagaaaataccatttcatatgcaggctgcatgtcccagctcttcttgttcacatggtctctgggagctgagatggttctcttcaccaccatggcctatgaccgctatgtggccatttgtttccctcttcattacagtactgttatgaaccaccatatgtgtgtagccttgctcagcatggtcatggctattgcagtcaccaattcctgggtgcacacagctcttatcatgaggttgactttctgtgggccaaacaccattgaccacttcttctgtgagatacccccattgctggctttgtcctgtagccctgtaagaatcaatgaggtgatggtgtatgttgctgatattaccctggccataggggactttattcttacctgcatctcctatggttttatcattgttgctattctccgtatccgcacagtagaaggcaagaggaaggccttctcaacatgctcatctcatctcacagtggtgaccctttactattctcctgtaatctacacctatatccgccctgcttccagctatacatttgaaagagacaaggtggtagctgcactctatactcttgtgactcccacattaaacccgatggtgtacagcttccagaatagggagatgcaggcaggaattaggaaggtgtttgcatttctgaaacactag

SEQ ID NO: 231 - protein, 315 aa, Homo sapiens
MTNQTQMMEFLLVRFTENWVLLRLHALLFSLIYLTAVLMNLVIILLMILDHRLHMAMYFFLRHLSFLDLCLISATVPKSILNSVASTDSISFLGCVLQLFLVVLLAGSEIGILTAMSYDRYAAICCPLHCEAVMSRGLCVQLMALSWLNRGALGLLYTAGTFSLNFYGSDELHQFFCDVPALLKLTCSKEHAIISVSVAIGVCYAFSCLVCIVVSYVYIFSAVLRISQRQRQSKAFSNCVPHLIVVTVFLVTGAVAYLKPGSDAPSILDLLVSVFYSVAPPTLNPVIYCLKNKDIKSALSKVLWNVRSSGVMKDD

SEQ ID NO: 232 - DNA, 948 bp, Homo sapiens
atgaccaatcagacacagatgatggaattcttgcttgtgagatttactgagaattgggtgctcctgaggctgcatgctttgctcttctcactgatctacctcacggctgtgctgatgaatttagtcatcattctcctcatgattctggaccatcgtctccacatggcaatgtactttttcctccgacatttgtccttcttagacctgtgtctcatttctgccacagtccccaaatccatcctcaactctgtcgcctccactgactccatctccttcctggggtgtgtgttgcagctcttcttggtggtactgctggctggatcagagattggcatccttactgccatgtcctatgaccgctatgctgccatctgctgccccctacactgtgaggctgtcatgagcagagggctctgtgtccagttgatggctctgtcctggctcaacagaggggccttgggactcttgtacacagctggaacattctctctgaatttttatggctctgatgagctacatcagttcttctgcgatgtccctgccctactaaagctcacttgttctaaagaacatgccatcattagtgtcagtgtggccattggggtctgttatgcattttcatgtttagtttgcattgtagtttcctatgtgtacattttctctgctgtgttaaggatatcacagagacagagacaatccaaagccttttccaactgtgtgcctcacctcattgttgtcactgtgtttcttgtaacaggtgctgttgcttatttaaagccagggtctgatgcaccttctattctagacttgctggtgtctgtgttctattctgtcgcacctccaaccttgaaccctgttatctactgtctgaagaacaaggacattaaatccgctctgagtaaagtcctgtggaatgttagaagcagtggggtaatgaaagatgactaa

SEQ ID NO: 233 - protein, 325 aa, Homo sapiens
MFLYLCFIFQRTCSEEMEEENATLLTEFVLTGFLHQPDCKIPLFLAFLVIYLITIMGNLGLIVLIWKDPHLHIPMYLFLGSLAFVDASLSSTVTPKMLINFLAKSKMISLSECMVQFFSLVTTVTTECFLLATMAYDRYVAICKALLYPVIMTNELCIQLLVLSFIGGLLHALIHEAFSFRLTFCNSNIIQHFYCDIIPLLKISCTDSSINFLMVFIFAGSVQVFTIGTILISYTIILFTILEKKSIKGIRKAVSTCGAHLLSVSLYYGPLTFKYLGSASPQADDQDMMESLFYTVIVPLLNPMIYSLRNKQVIASFTKMFKSNV

SEQ ID NO: 234 - DNA, 978 bp, Homo sapiens
atgttcctttacctttgcttcatttttcagaggacatgcagtgaggagatggaagaggaaaatgcaacattgctgacagagtttgttctcacaggatttttacatcaacctgactgtaaaataccgctcttcctggcattcttggtaatatatctcatcaccatcatggggaatcttggtctaattgttctcatctggaaagaccctcaccttcatatcccaatgtacttattccttgggagtttagcctttgtggatgcttcgttatcatccacagtgactccgaagatgctgatcaacttcttagctaagagtaagatgatatctctctctgaatgcatggtacaatttttttcccttgtaaccactgtaaccacagaatgttttctcttggcaacaatggcatatgatcgctatgtagccatttgcaaagctttactttatccagtcattatgaccaatgaactatgcattcagctattagtcttgtcatttataggtggccttcttcatgctttaatccatgaagctttttcattcagattaaccttctgtaattccaacataatacaacacttttactgtgacattatcccattgttaaagatttcctgtactgattcctctattaactttctaatggtttttattttcgcaggttctgttcaagtttttaccattggaactattcttatatcttatacaattatcctctttacaatcttagaaaagaagtctatcaaagggatacgaaaagctgtctccacctgtggggctcatctcttatctgtatctttatactatggccccctcaccttcaaatatctgggctctgcatctccgcaagcagatgaccaagatatgatggagtctctattttacactgtcatagttcctttattaaatcccatgatctacagcctgagaaacaagcaagtaatagcttcattcacaaaaatgttcaaaagcaatgtttag

SEQ ID NO: 235 - protein, 314 aa, Homo sapiens
MSNEDMEQDNTTLLTEFVLTGLTYQPEWKMPLFLVFLVIYLITIVWNLGLIALIWNDPQLHIPMYFFLGSLAFVDAWISSTVTPKMLVNFLAKNRMISLSECMIQFFSFAFGGTTECFLLATMAYDRYVAICKPLLYPVIMNNSLCIRLLAFSFLGGFLHALIHEVLIFRLTFCNSNIIHHFYCDIIPLFMISCTDPSINFLMVFILSGSIQVFTIVTVLNSYTFALFTILKKKSVRGVRKAFSTCGAHLLSVSLYYGPLIFMYLRPASPQADDQDMIDSVFYTIIIPLLNPIIYSLRNKQVIDSFTKMVKRNV

SEQ ID NO: 236 - DNA, 945 bp, Homo sapiens
atgtcgaatgaggacatggaacaggataatacaacattgctgacagagtttgttctcacaggacttacatatcagccagagtggaaaatgcccctgttcttggtgttcttggtgatctatctcatcactattgtgtggaaccttggtctgattgctcttatctggaatgacccacaacttcacatccccatgtacttttttcttgggagtttagcctttgttgatgcttggatatcttccacagtaactcccaaaatgttggttaatttcttggccaaaaacaggatgatatctctgtctgaatgcatgattcaatttttttcctttgcatttggtggaactacagaatgttttctcttggcaacaatggcatatgatcgctatgtagccatatgcaaacctttactatatccagtgattatgaacaattcactatgcatacggctgttagccttctcatttttaggtggcttcctccatgccttaattcatgaagtccttatattcagattaaccttctgcaattctaacataatacatcatttttactgtgatattataccactgtttatgatttcctgtactgacccttctattaattttctaatggtttttattttgtctggctcaattcaggtattcaccattgtgacagttcttaattcttacacatttgctcttttcacaatcctaaaaaagaagtctgttagaggcgtaaggaaagccttttccacctgtggagcccatctcttatctgtctctttatattatggcccacttatcttcatgtatttgcgccctgcatctccacaagcagatgaccaagatatgatagactctgtcttttatacaatcataattcctttgctaaatcccattatctacagtctgagaaataaacaagtaatagattcattcacaaaaatggtaaaaagaaatgtttag

SEQ ID NO: 237 - protein, 308 aa, Homo sapiens
METQNLTVVTEFILLGLTQSQDAQLLVFVLVLIFYLIILPGNFLIIFTIKSDPGLTAPLYFFLGNLALLDASYSFIVVPRMLVDFLSEKKVISYRSCITQLFFLHFLGAGEMFLLVVMAFDRYIAICRPLHYSTIMNPRACYALSLVLWLGGFIHSIVQVALILHLPFCGPNQLDNFFCDVPQVIKLACTNTFVVELLMVSNSGLLSLLCFLGLLASYAVILCRIREHSSEGKSKAISTCTTHIIIIFLMFGPAIFIYTCPFQAFPADKVVSLFHTVIFPLMNPVIYTLRNQEVKASMRKLLSQHMFC

SEQ ID NO: 238 - DNA, 927 bp, Homo sapiens
atggaaacacagaacctcacagtggtgacagaattcattcttcttggtctgacccagtctcaagatgctcaacttctggtctttgtgctagtcttaattttctaccttatcatcctccctggaaatttcctcatcattttcaccataaagtcagaccctgggctcacagcccccctctatttctttctgggcaacttggccttactggatgcatcctactccttcattgtggttcccaggatgttggtggacttcctctctgagaagaaggtaatctcctatagaagctgcatcactcagctctttttcttgcattttcttggagcgggagagatgttcctcctcgttgtgatggcctttgaccgctacatcgccatctgccggcctttacactattcaaccatcatgaaccctagagcctgctatgcattatcgttggttctgtggcttgggggctttatccattccattgtacaagtagcccttatcctgcacttgcctttctgtggcccaaaccagctcgataacttcttctgtgatgttccacaggtcatcaagctggcctgcaccaatacctttgtggtggagcttctgatggtctccaacagtggcctgctcagcctcctgtgcttcctgggccttctggcctcctatgcagtcatcctctgtcgtataagggagcactcctctgaaggaaagagcaaggctatttccacatgcaccacccatattatcattatatttctcatgtttggacctgctattttcatctacacttgccccttccaggctttcccagctgacaaggtagtttctcttttccatactgtcatctttcctttgatgaaccctgttatttatacgcttcgcaaccaggaggtgaaagcttccatgaggaagttgttaagtcaacatatgttttgctga

SEQ ID NO: 239 - protein, 343 aa, Homo sapiens
MALYFSLILHGMSDLFFLSTGHPRASCRMEAMKLLNQSQVSEFILLGLTSSQDVEFLLFALFSVIYVVTVLGNLLIIVTVFNTPNLNTPMYFLLGNLSFVDMTLASFATPKVILNLLKKQKVISFAGCFTQIFLLHLLGGVEMVLLVSMAFDRYVAICKPLHYMTIMNKKVCVLLVVTSWLLGLLHSGFQIPFAVNLPFCGPNVVDSIFCDLPLVTKLACIDIYFVQVVIVANSGIISLSCFIILLISYSLILITIKNHSPTGQSKARSTLTAHITVVILFFGPCIFIYIWPFGNHSVDKFLAVFYTIITPILNPIIYTLRNKEMKISMKKLWRAFVNSREDT

SEQ ID NO: 240 - DNA, 1032 bp, Homo sapiens
atggctctttatttttcactcatactccatggtatgagtgatcttttctttctctctacaggtcatccaagagcgagctgtaggatggaggccatgaaactattaaatcaatctcaagtgtcagaattcattttgctgggactgaccagctcccaggatgtagagtttcttctctttgccctcttctcggttatctatgtggtcacagttttgggtaaccttcttattatagtcacagtgtttaacacccctaacctgaatactcccatgtattttctccttggtaatctctcttttgtagatatgacccttgcttcttttgccacccctaaggtgattctgaacttgttaaaaaagcagaaggtaatttcttttgctgggtgcttcactcagatatttctccttcacttactgggtggggttgaaatggtactgttggtctccatggcttttgacagatatgtggccatttgtaagcccctacactacatgaccatcatgaacaagaaggtatgtgttttgcttgtagtgacctcatggctcttgggtctccttcactcagggtttcagataccatttgctgtgaacttgcccttttgtggtcccaatgtggtagacagcattttttgtgacctccctttggttactaagcttgcctgtatagacatatattttgtacaggtagtcattgttgccaacagtggcataatctccctgagctgtttcattattttgcttatctcctacagtctgatcctcataaccattaagaaccactctcctactgggcaatctaaagcccgttccactttgactgctcacatcacagtggtgattctcttctttggcccatgcatctttatctacatttggcccttcggcaaccactctgtagataagttccttgctgtgttttataccatcatcactcctatcttgaatccaattatctatactctgagaaacaaagaaatgaagatatccatgaaaaaactctggagagcttttgtgaattctagagaagatacttag

SEQ ID NO: 241 - protein, 309 aa, Homo sapiens
MASTSNVTELIFTGLFQDPAVQSVCFVVFLPVYLATVVGNGLIVLTVSISKSLDSPMYFFLSCLSLVEISYSSTIAPKFIIDLLAKIKTISLEGCLTQIFFFHFFGVAEILLIVVMAYDCYVAICKPLHYMNIISRQLCHLLVAGSWLGGFCHSIIQILVIIQLPFCGPNVIDHYFCDLQPLFKLACTDTFMEGVIVLANSGLFSVFSFLILVSSYIVILVNLRNHSAEGRHKALSTCASHITVVILFFGPAIFLYMRPSSTFTEDKLVAVFYTVITPMLNPIIYTLRNAEVKIAIRRLWSKKENPGRE

SEQ ID NO: 242 - DNA, 930 bp, Homo sapiens
atggccagtacaagtaatgtgactgagttgattttcactggccttttccaggatccagctgtgcagagtgtatgctttgtggtgtttctccccgtgtaccttgccacggtggtgggcaatggcctcatcgttctgacggtcagtatcagcaagagtctggattctcccatgtacttcttccttagctgcctgtccttggtggagatcagttattcctccactatcgcccctaaattcatcatagacttacttgccaagattaaaaccatctctctggaaggctgtctgactcagatattcttcttccacttctttggggttgctgagatccttttgattgtggtgatggcctatgattgctacgtggccatttgcaagcctcttcattatatgaacattatcagtcgtcaactgtgtcaccttctggtggctggttcctggctggggggcttttgtcactccataattcagattctcgttatcatccaattgcccttctgtggtcccaatgtgattgaccactatttctgtgacctccagcctttattcaagcttgcctgcactgacaccttcatggagggggttattgtgttggccaacagtggattattctctgtcttctccttcctcatcttggtgtcctcttatattgtcattctggtcaacttgaggaaccattctgcagaggggaggcacaaagccctctccacctgtgcttctcacatcacagtggtcatcttgttttttggacctgctatcttcctctacatgcgaccttcttccactttcactgaagataaacttgtggctgtattctacacggtcatcacccccatgctgaaccccatcatttacacactcaggaatgcagaggtgaaaatcgccataagaagattgtggagcaaaaaggagaatccagggagggagtga

SEQ ID NO: 243 - protein, 305 aa, Homo sapiens
MVATNNVTEIIFVGFSQNWSEQRVISVMFLLMYTAVVLGNGLIVVTILASKVLTSPMYFFLSYLSFVEICYCSVMAPKLIFDSFIKRKVISLKGCLTQMFSLHFFGGTEAFLLMVMAYDRYVAICKPLHYMAIMNQRMCGLLVRIAWGGGLLHSVGQTFLIFQLPFCGPNIMDHYFCDVHPVLELACADTFFISLLIITNGGSISVVSFFVLMASYLIILHFLRSHNLEGQHKALSTCASHVTVVDLFFIPCSLVYIRPCVTLPADKIVAVFYTVVTPLLNPVIYSFRNAEVKNAMRRFIGGKVI

SEQ ID NO: 244 - DNA, 918 bp, Homo sapiens
atggttgctacaaacaatgtgactgaaataattttcgtgggattttcccagaattggagtgagcagagggtcatttctgtgatgtttctcctcatgtacacagctgttgtgctgggcaatggcctcattgtggtgaccatcctggccagcaaagtgctcacctcccccatgtatttctttctcagctacttatcctttgtggagatctgctactgttctgtcatggcccccaagcttatctttgactcctttatcaagaggaaagtcatttctctcaagggctgcctcacacagatgttttccctccatttctttggtggcactgaggcctttctcctgatggtgatggcctatgaccgctatgtggccatctgcaagcccttgcactacatggccatcatgaaccagcgaatgtgtggtctcctcgtgaggatagcatggggcgggggcctgctgcattctgttgggcaaaccttcctgattttccagctcccgttctgtggccccaacatcatggaccactacttctgtgatgtccacccagtgctggagctggcctgcgcagacaccttcttcattagcctgctgatcatcaccaatggcggctccatctccgtagtcagtttcttcgtgctgatggcttcctacctgatcatcctgcacttcctgagaagccacaacttggaggggcagcacaaggccctctccacctgtgcctctcatgtcacagttgtcgacctgttcttcataccttgctccttggtctatattaggccctgtgtcaccctccctgcagacaagatagttgctgtattttatacagtggtcacacctctcttaaaccctgtgatttactccttcaggaatgctgaagtgaaaaatgccatgaggagatttattgggggaaaagtaatttga

SEQ ID NO: 245 - protein, 303 aa, Homo sapiens
MTEFIFLVLSPNQEVQRVCFVIFLFLYTAIVLGNFLIVLTVMTSRSLGSPMYFFLSYLSFMEICYSSATAPKLISDLLAERKVISWWGCMAQLFFLHFFGGTEIFLLTVMAYDHYVAICKPLSYTTIMNWQVCTVLVGIAWVGGFMHSFAQILLIFHLLFCGPNVINHYFCDLVPLLKLACSDTFLIGLLIVANGGTLSVISFGVLLASYMVILLHLRTWSSEGWCKALSTCGSHFAVVILFFGPCVFNSLRPSTTLPIDKMVAVFYTVITAILNPVIYSLRNAEMRKAMKRLWIRTLRLNEK

SEQ ID NO: 246 - DNA, 912 bp, Homo sapiens
atgactgaattcatttttctggtactttctcccaaccaggaggtgcagagggtttgctttgtgatatttctgttcttgtacacagcaattgtgctggggaatttcctcattgtgctcactgtcatgaccagcagaagccttggttcccccatgtacttcttcctcagctacctctccttcatggagatctgctactcctccgctacagcccccaaactcatctcagatctgctggctgaaaggaaagtcatatcttggtggggctgcatggcacagcttttcttcttgcacttctttggtggcactgagattttcctgctcactgtgatggcctatgaccactatgtggccatctgcaagcccctcagctacaccaccatcatgaactggcaggtgtgtactgtccttgtaggaatagcatgggtgggaggcttcatgcattcctttgcacaaatccttctcatcttccacctgctcttctgtggccccaatgtgatcaatcactatttctgtgacctagttccccttctcaaacttgcctgctctgacaccttcctcattggtctgctgattgttgccaatggaggcaccctgtctgtgatcagttttggggtcctcttagcatcctatatggtcatcttgctccatctgagaacctggagctctgaagggtggtgcaaagccctctccacctgtgggtcccatttcgctgtggttatcttgttctttgggccctgcgtcttcaactctctgaggccttctaccactctgcccatagacaagatggtggctgtgttctacacagtgataaccgcgatcctgaaccctgtcatctactctctgagaaatgctgaaatgaggaaggccatgaagaggctgtggattaggacattgagactaaatgagaaatag

SEQ ID NO: 247 - protein, 325 aa, Homo sapiens
MTTIILEVDNHTVTTRFILLGFPTRPAFQLLFFSIFLATYLLTLLENLLIILAIHSDGQLHKPMYFFLSHLSFLEMWYVTVISPKMLVDFLSHDKSISFNGCMTQLYFFVTFVCTEYILLAIMAFDRYVAICNPLRYPVIMTNQLCGTLAGGCWFCGLMTAMIKMVFIAQLHYCGMPQINHYFCDISPLLNVSCEDASQAEMVDFFLALMVIAIPLCVVVASYAAILATILRIPSAQGRQKAFSTCASHLTVVILFYSMTLFTYARPKLMYAYNSNKVVSVLYTVIVPLLNPIIYCLRNHEVKAALRKTIHCRGSGPQGNGAFSS

SEQ ID NO: 248 - DNA, 978 bp, Homo sapiens
atgaccaccataattctggaagtagataatcatacagtgacaacacgtttcattcttctggggtttccaacacgaccagccttccagcttctctttttctccattttcctggcaacctatctgctgacactgctggagaatcttcttatcatcttagctatccacagtgatgggcagctgcataagcccatgtacttcttcttgagccacctctccttcctggagatgtggtatgtcacagtcatcagccccaagatgcttgttgacttcctcagtcatgacaagagtatttccttcaatggctgcatgactcaactttacttttttgtgacctttgtctgcactgagtacatccttcttgctatcatggcctttgaccgctatgtagccatttgtaatccactacgctacccagtcatcatgaccaaccagctctgtggcacactggctggaggatgctggttctgtggactcatgactgccatgattaagatggtttttatagcacaacttcactactgtggcatgcctcagatcaatcactacttttgtgatatctctccactccttaacgtctcctgtgaggatgcctcacaggctgagatggtggacttcttcttggccctcatggtcattgctattcctctttgtgttgtggtggcatcctacgctgctatccttgccaccatcctcaggatcccttctgctcagggccgccaaaaggcattctccacctgtgcctcccacctgaccgtcgtaattctcttctattccatgacacttttcacctatgcccgtcccaaactcatgtatgcctacaattccaacaaagtggtatctgttctctacactgtcattgttccactcctcaaccccatcatttactgtctgaggaaccatgaagtaaaggcagccctcagaaagaccatacattgcagaggaagtgggccccagggaaatggggctttcagtagttaa

SEQ ID NO: 249 - protein, 327 aa, Homo sapiens
MIFPSHDSQAFTSVDMEVGNCTILTEFILLGFSADSQWQPILFGVFLMLYLITLSGNMTLVILIRTDSHLHTPMYFFIGNLSFLDFWYTSVYTPKILASCVSEDKRISLAGCGAQLFFSCVVAYTECYLLAAMAYDRHAAICNPLLYSGTMSTALCTGLVAGSYIGGFLNAIAHTANTFRLHFCGKNIIDHFFCDAPPLVKMSCTNTRVYEKVLLGVVGFTVLSSILAILISYVNILLAILRIHSASGRHKAFSTCASHLISVMLFYGSLLFMYSRPSSTYSLERDKVAALFYTVINPLLNPLIYSLRNKDIKEAFRKATQTIQPQT

SEQ ID NO: 250 - DNA, 984 bp, Homo sapiens
atgattttcccttctcatgatagtcaggctttcacctccgtggacatggaagtgggaaattgcaccatcctgactgaattcatcttgttgggtttctcagcagattcccagtggcagccgattctatttggagtgtttctgatgctctatttgataaccttgtcaggaaacatgaccttggttatcttaatccgaactgattcccacttgcatacacctatgtactttttcattggcaatctgtcttttttggatttctggtatacctctgtgtatacccccaaaatcctggccagttgtgtctcagaagataagcgcatttccttggctggatgtggggctcagctgtttttttcctgtgttgtagcctacactgaatgctatctcctggcagccatggcatatgaccgccatgcagcaatttgtaacccattgctttattcaggtaccatgtccaccgccctctgtactgggcttgttgctggctcctacataggaggatttttgaatgccatagcccatactgccaatacattccgcctgcatttttgtggtaaaaatatcattgaccactttttctgtgatgcaccaccattggtaaaaatgtcctgtacaaacaccagggtctacgaaaaagtcctgcttggtgtggtgggcttcacagtactctccagcattcttgctatcctgatttcctatgtcaacatcctcctggctatcctgagaatccactcagcttcaggaagacacaaggcattctccacctgtgcttcccacctcatctcagtcatgctcttctatggatcattgttgtttatgtattcaaggcctagttccacctactccctagagagggacaaagtagctgctctgttctacaccgtgatcaacccactgctcaaccctctcatctatagcctgagaaacaaagatatcaaagaggccttcaggaaagcaacacagactatacaaccacaaacatga

SEQ ID NO: 251 - protein, 308 aa, Homo sapiens
MTMENYSMAAQFVLDGLTQQAELQLPLFLLFLGIYVVTVVGNLGMILLIAVSPLLHTPMYYFLSSLSFVDFCYSSVITPKMLVNFLGKKNTILYSECMVQLFFFVVFVVAEGYLLTAMAYDRYVAICSPLLYNAIMSSWVCSLLVLAAFFLGFLSALTHTSAMMKLSFCKSHIINHYFCDVLPLLNLSCSNTHLNELLLFIIAGFNTLVPTLAVAVSYAFILYSILHIRSSEGRSKAFGTCSSHLMAVVIFFGSITFMYFKPPSSNSLDQEKVSSVFYTTVIPMLNPLIYSLRNKDVKKALRKVLVGK

SEQ ID NO: 252 - DNA, 927 bp, Homo sapiens
atgaccatggaaaattattctatggcagctcagtttgtcttagatggtttaacacagcaagcagagctccagctgcccctcttcctcctgttcctgggaatctatgtggtcacagtagtgggcaacctgggcatgattctcctgattgcagtcagccctctacttcacacccccatgtactatttcctcagcagcttgtccttcgtcgatttctgctattcctctgtcattactcccaaaatgctggtgaacttcctaggaaagaagaatacaatcctttactctgagtgcatggtccagctctttttctttgtggtctttgtggtggctgagggttacctcctgactgccatggcatatgatcgctatgttgccatctgtagcccactgctttataatgcgatcatgtcctcatgggtctgctcactgctagtgctggctgccttcttcttgggctttctctctgccttgactcatacaagtgccatgatgaaactgtccttttgcaaatcccacattatcaaccattacttctgtgatgttcttcccctcctcaatctctcctgctccaacacacacctcaatgagcttctactttttatcattgcggggtttaacaccttggtgcccaccctagctgttgctgtctcctatgccttcatcctctacagcatccttcacatccgctcctcagagggccggtccaaagcttttggaacatgcagctctcatctcatggctgtggtgatcttctttgggtccattaccttcatgtatttcaagcccccttcaagtaactccctggaccaggagaaggtgtcctctgtgttctacaccacggtgatccccatgctgaaccctttaatatacagtctgaggaataaggatgtgaagaaagcattaaggaaggtcttagtaggaaaatga

SEQ ID NO: 253 - protein, 322 aa, Homo sapiens [sequence omitted]

SEQ ID NO: 254 - DNA, 969 bp, Homo sapiens
atgagccctgagaaccagagcagcgtgtccgagttcctcctcctgggcctccccatccggccagagcagcaggccgtgttcttcgccctgttcctgggcatgtacctgaccacggtgctggggaacctgctcatcatgctgctcatccagctagactctcaccttcacacccccatgtacttcttccttagccacttggccctcactgacatctccttttcatctgtcactgtccctaagatgctgatgaacatgcagactcagcacctagccgtcttttacaagggatgcatttcacagacatattttttcatattttttgctgacttagacagtttccttatcacttcaatggcatatgacaggtatgtggccatctgtcatcctctacattatgccaccatcatgactcagagccagtgtgtcatgctggtggctgggtcctgggtcatcgcttgtgcgtgtgctcttttgcataccctcctcctggcccagctttccttctgtgctgaccacatcatccctcactacttctgtgaccttggtgccctgctcaagttgtcctgctcagacacctccctcaatcagttagcaatctttacagcagcattgacagccattatgcttccattcctgtgcatcctggtttcttatggtcacattggggtcaccatcctccagattccctctaccaagggcatatgcaaagccttgtccacttgtggatcccacctctcagtggtgactatctattatcggacaattattggtctctattttcttcccccatccagcaacaccaatgacaagaacataattgcttcagtgatatacacagcagtcactcccatgttgaacccattcatttacagtctgagaaataaagacattaagggagccctaagaaaactcttgagtaggtcaggcgcagtggctcatgcctgtaatctcagcactttgggaggctga

SEQ ID NO: 255 - protein, 307 aa, Homo sapiens
MLNFTDVTEFILLGLTSRREWQVLFFIVFLVVYIITVVGNIGMMLLIKVSPQLNSPMYFFLSHLSFVDVWFSSNVTPKMLENLFSDKKTISYADCLAQCFFFIALVHVEIFILAAIAFDRYTVIGNPLLYGSKMSRGVCIRLITFPYIYGFLTSLTATLWTYGLYFCGKIEINHFYCADPPLIKMACAGTFVKEYTMLILAGINFTYSLTVIIISYLFILIAILRMRSAEGRQKAFSTCGSHPTAVIIFYGTLIFMYLRRPTEESVEQGKMVAVFYTTVIPMLNPMIYSLRNKDVKKAMMKVISRSC

SEQ ID NO: 256 - DNA, 924 bp, Homo sapiens
atgctcaatttcaccgatgtgacagagttcattcttttggggctaacgagccgtcgggaatggcaagttctcttcttcatcgtttttcttgtggtctacattatcaccgtggtgggcaatatcggcatgatgttgttaatcaaggtcagtcctcagcttaacagccccatgtactttttcctcagtcacttgtcatttgttgatgtgtggttttcttccaatgtcacccctaaaatgttggaaaatctgttatcagataaaaaaacaatttcttatgctggctgtttagcacagtgtttcttcttcattgctcttgtccatgtggaaatttttattcttgctgcgattgcctttgatagatacacagtgattggaaatcctttgctttatggcagcaaaatgtcaagggatgtctgtattcgactgattactttcccttacatttatggttttctgacgagtctgacagcaacattatggacttatggcttgtacttctgtggaaaaattgagatcaaccatttctactgtgcagatccacctctcatcaaaatggcctgtgccgggacctttgtaaaagaatatacaatgctcatacttgccggcatcaacttcacatattccctgactgtaattatcatctcttacttattcatcctcattgccattctgcgaatgcgctcagcagaaggaaggcagaaggccttttccacatgtgggtcccatctgacagctgtcatcatattctatggtactctgatcttcatgtatctcagacgtcccacagaggagtctgtggagcaggggaagatggtggctgtgttctataccacagtgatccccatgttgaatcccatgatctacagtctgaggaacaaggatgtgaaaaaggccatgatgaaagtgatcagcagatcatgttaa

SEQ ID NO: 257 - protein, 299 aa, Homo sapiens
MGFPGIHSWQHWLSLPLALLYLLALSANILILIIINKEAALHQPMYYFLGILAMADIGLATTIMPKILAILWFNAKTISLLECFAQMYAIHCFVAMESSTFVCMAIDRYVAICRPLRYPSIITESFVFKANGFMALRNSLCLISVPLLAAQRHYCSQNQIEHCLCSNLGVTSLSCDDRRINSINQVLLAWTLMGSDLGLIILSYALILYSVLKLNSPEAASKALSTCTSHLILILFFYTVIIVISITRSTGMRVPLIPVLLNVLHNVIPPALNPMVYALKNKELRQGLYKVLRLGVKGT

SEQ ID NO: 258 - DNA, 900 bp, Homo sapiens
atgggattccctggcattcacagttggcagcactggctctccctgcccctggctctgctctacctcttagctctcagtgccaacatccttatcctgatcatcatcaacaaagaggcagcactgcaccagcctatgtactatttcctgggcatcttggctatggcagacataggcctggctaccaccatcatgcctaagattttggccatcttatggttcaatgctaagaccatcagtctcctggagtgctttgctcagatgtatgccatacattgctttgtggccatggaatcaagtacctttgtctgcatggctattgatagatatgtagccatttgtcgaccgctacgatatccatcaatcatcactgaatcttttgttttcaaagcaaatgggttcatggcactgagaaacagcctgtgtctcatctcagtgcctctgttggctgcccagaggcattactgctcccagaatcaaattgagcactgtctttgttctaaccttggagtcactagcctatcttgtgatgatcgaagaatcaatagcattaaccaggtccttttggcttggacactcatgggaagtgacctgggtttgattattttatcatatgctctaatactttactctgtcctgaagctgaactctccagaagctgcatccaaggccttaagtacctgcacctcccacctcatcttaatccttttcttctacacagtcatcattgtgatttccattactcgtagtacaggaatgagagttccccttattccagttctacttaatgtgctacacaatgtcattccccctgccctgaaccccatggtatatgcactcaagaacaaggaactcaggcaaggcttatacaaggtacttagactgggagtgaagggcacctga

SEQ ID NO: 259 - protein, 321 aa, Homo sapiens
MLTLNKTDLIPASFILNGVPGLEDTQLWISFPFCSMYVVAMVGNCGLLYLIHYEDALHKPMYYFLAMLSFTDLVMCSSTIPKALCIFWFHLKDIGFDECLVQMFFIHTFTGMESGVLMLMALDRYVAICYPLRYSTILTNPVIAKVGTATFLRGVLLIIPFTFLTKRLPYCRGNILPHTYCDHMSVAKLSCGNVKVNAIYGLMVALLIGGFDILCITISYTMILRAVVSLSSADARQKAFNTCTAHICAIVFSYTPAFFSFFSHRFGEHIIPPSCHIIVANIYLLLPPTMNPIVYGVKTKQIRDCVIRILSGSKDTKSYSM

SEQ ID NO: 260 - DNA, 966 bp, Homo sapiens
atgctaacactgaataaaacagacctaataccagcttcatttattctgaatggagtcccaggactggaagacacacaactctggatttccttcccattctgctctatgtatgttgtggctatggtagggaattgtggactcctctacctcattcactatgaggatgccctgcacaaacccatgtactacttcttggccatgctttcctttactgaccttgttatgtgctctagtacaatccctaaagccctctgcatcttctggtttcatctcaaggacattggatttgatgaatgccttgtccagatgttcttcatccacaccttcacagggatggagtctggggtgcttatgcttatggccctggatcgctatgtggccatctgctaccccttacgctattcaactatcctcaccaatcctgtaattgcaaaggttgggactgccaccttcctgagaggggtattactcattattccctttactttcctcaccaagcgcctgccctactgcagaggcaatatacttccccatacctactgtgaccacatgtctgtagccaaattgtcctgtggtaatgtcaaggtcaatgccatctatggtctgatggttgccctcctgattgggggctttgacatactgtgtatcaccatctcctataccatgattctccgggcagtggtcagcctctcctcagcagatgctcggcagaaggcctttaatacctgcactgcccacatttgtgccattgttttctcctatactccagctttcttctccttcttttcccaccgctttggggaacacataatccccccttcttgccacatcattgtagccaatatttatctgctcctaccacccactatgaaccctattgtctatggggtgaaaaccaaacagatacgagactgtgtcataaggatcctttcaggttctaaggataccaaatcctacagcatgtga

SEQ ID NO: 261 - protein, 329 aa, Homo sapiens [sequence omitted]

SEQ ID NO: 262 - DNA, 990 bp, Homo sapiens
atgtccagcactcttggccacaacatggaatctcctaatcacactgatgttgacccttctgtcttcttcctcctgggcatcccaggtctggaacaatttcatttgtggctctcactccctgtgtgtggcttaggcacagccacaattgtgggcaatataactattctggttgttgttgccactgaaccagtcttgcacaagcctgtgtacctttttctgtgcatgctctcaaccatcgacttggctgcctctgtctccacagttcccaagctactggctatcttctggtgtggagccggacatatatctgcctctgcctgcctggcacagatgttcttcattcatgccttctgcatgatggagtccactgtgctactggccatggcctttgatcgctacgtggccatctgccacccactccgctatgccacaatcctcactgacaccatcattgcccacataggggtggcagctgtagtgcgaggctccctgctcatgctcccatgtcccttccttattgggcgtttgaacttctgccaaagccatgtgatcctacacacgtactgtgagcacatggctgtggtgaagctggcctgtggagacaccaggcctaaccgtgtgtatgggctgacagctgcactgttggtcattggggttgacttgttttgcattggtctctcctatgccctaagtgcacaagctgtccttcgcctctcatcccatgaagctcggtccaaggccctagggacctgtggttcccatgtctgtgtcatcctcatctcttatacaccagccctcttctccttttttacacaccgctttggccatcacgttccagtccatattcacattcttttggccaatgtttatctgcttttgccacctgctcttaatcctgtggtatatggagttaagaccaaacagatccgtaaaagagttgtcagggtgtttcaaagtgggcagggaatgggcatcaaggcatctgagtga

SEQ ID NO: 263 - protein, 314 aa, Homo sapiens
MLGLNGTPFQPATLQLTGIPGIQTGLTWVALIFCILYMISIVGNLSILTLVFWEPALHQPMYYFLSMLALNDLGVSFSTLPTVISTFCFNYNHVAFNACLVQMFFIHTFSFMESGILLAMSLDRFVAICYPLRYVTVLTHNRILAMGLGILTKSFTTLFPFPFVVKRLPFCKGNVLHHSYCLHPDLMKVACGDIHVNNIYGLLVIIFTYGMDSTFILLSYALILRAMLVIISQEQRLKALNTCMSHICAVLAFYVPIIAVSMIHRFWKSAPPVVHVMMSNVYLFVPPMLNPIIYSVKTKEIRKGILKFFHKSQA

SEQ ID NO: 264 - DNA, 945 bp, Homo sapiens
atgctgggtctcaatggcacccccttccagccagcaacactccagctgacaggcattcctgggatacaaacaggcctcacctgggttgccctgattttctgcatcctctacatgatctccattgtaggtaacctcagcattctcactctggtgttttgggagcctgctctgcatcagcccatgtactacttcctctctatgctcgctctcaatgatctgggagtgtccttttctacacttcccactgtgatttctactttctgcttcaactacaaccatgttgcgtttaatgcttgcctggtccagatgttcttcatccacactttctccttcatggagtcaggcatactgctggccatgagcttggatcgctttgtggctatttgttatccattacgctatgtcactgtgctcactcacaaccgtatattggctatgggtctgggcatccttaccaagagtttcaccactctcttccctttcccttttgtggtgaaacgactgcccttctgcaaaggcaatgttttgcatcactcctactgtctccatccagatctcatgaaagtagcatgtggagacatccatgttaacaacatttatgggctcttggtgatcatttttacctatggtatggactcaactttcatcctgctttcctacgcattgatcctgagagccatgctggtcatcatatcccaggaacagcggctcaaggcactcaacacctgcatgtcacacatctgtgcagtgctggccttttatgtgcccataattgctgtctccatgattcaccgcttctggaaaagtgctccacctgttgttcatgtcatgatgtccaatgtctacctgtttgtaccacccatgctcaaccctatcatctacagtgtgaaaaccaaggagatccgcaaagggattctcaagttcttccataaatcccaggcctga

SEQ ID NO: 265 - protein, 312 aa, Homo sapiens
MGLFNVTHPAFFLLTGIPGLESSHSWLSGPLCVMYAVALGGNTVILQAVRVEPSLHEPMYYFLSMLSFSDVAISMATLPTVLRTFCLNARNITFDACLIQMFLIHFFSMMESGILLAMSFDRYVAICDPLRYATVLTTEVIAAMGLGAAARSFITLFPLPFLIKRLPICRSNVLSHSYCLHPDMMRLACADISINSIYGLFVLVSTFGMDLFFIFLSYVLILRSVMATASREERLKALNTCVSHILAVLAFYVPMIGVSTVHRFGKHVPCYIHVLMSNVYLFVPPVLNPLIYSAKTKEIRRAIFRMFHHIKI

SEQ ID NO: 266 - DNA, 939 bp, Homo sapiens
atggggttgttcaatgtcactcaccctgcattcttcctcctgactggtatccctggtctggagagctctcactcctggctgtcagggcccctctgcgtgatgtatgctgtggcccttgggggaaatacagtgatcctgcaggctgtgcgagtggagcccagcctccatgagcccatgtactacttcctgtccatgttgtccttcagtgatgtggccatatccatggccacactgcccactgtactccgaaccttctgcctcaatgcccgcaacatcacttttgatgcctgtctaattcagatgtttcttattcacttcttctccatgatggaatcaggtattctgctggccatgagttttgaccgctatgtggccatttgtgaccccttgcgctatgcaactgtgctcaccactgaagtcattgctgcaatgggtttaggtgcagctgctcgaagcttcatcacccttttccctcttccctttcttattaagaggctgcctatctgcagatccaatgttctttctcactcctactgcctgcacccagacatgatgaggcttgcctgtgctgatatcagtatcaacagcatctatggactctttgttcttgtatccacctttggcatggacctgttttttatcttcctctcctatgtgctcattctgcgttctgtcatggccactgcttcccgtgaggaacgcctcaaagctctcaacacatgtgtgtcacatatcctggctgtacttgcattttatgtgccaatgattggggtctccacagtgcaccgctttgggaagcatgtcccatgctacatacatgtcctcatgtcaaatgtgtacctatttgtgcctcctgtgctcaaccctctcatttatagcgccaagacaaaggaaatccgccgagccattttccgcatgtttcaccacatcaaaatatga

SEQ ID NO: 267 - protein, 326 aa, Homo sapiens
MSVQYSLSPQFMLLSNITQFSPIFYLTSFPGLEGIKHWIFIPFFFMYMVAISGNCFILIIIKTNPRLHTPMYYLLSLLALTDLGLCVSTLPTTMGIFWFNSQSIYFGACQIQMFCIHSFSFMESSVLLMMSFDRFVAICHPLRYSVIITGQQVVRAGLIVIFRGPVATIPIVLLLKAFPYCGSVVLSHSFCLHQEVIQLACTDTTFNNLYGLMVVVFTVMLDLVLIALSYGLILHTVAGLASQEEQRRAFQTCTAHLCAVLVFFVPMMGLSLVHRFGKHAPPAIHLLMANVYLFVPPMLNPIIYSIKTKEIHRAIIKLLGLKKASK

SEQ ID NO: 268 - DNA, 981 bp, Homo sapiens
atgtcagtccaatattcgctcagtcctcaattcatgctgctatccaacattactcagtttagccccatattctatctcaccagctttcctggattggaaggcatcaaacactggattttcatcccctttttctttatgtacatggttgccatctcaggcaattgtttcattctgatcattattaagaccaaccctcgtctgcacacacccatgtactatctactatccttgctggccctcactgacctggggctgtgtgtgtccacgttgcccaccactatggggatcttctggtttaactcccagagtatctactttggagcgtgtcaaatccagatgttctgcatccactctttttccttcatggagtcctcagtgctcctcatgatgtcctttgaccgctttgtggccatctgccaccctctgaggtattcggtcattatcactggccagcaagtggtcagagcaggcctaattgtcatcttccggggacctgtggccactatccctattgtcctcctcctgaaggcttttccctactgtggatctgtggtcctctcccactcattttgcctgcaccaggaagtgatacagctggcctgcacagataccaccttcaataatctgtatggactgatggtggtagttttcactgtgatgctggacctggtgctcatcgcactgtcctatggactcatcctgcacacagtagcaggcctggcctcccaagaggagcagcgccgtgcctttcagacatgcaccgctcatctctgtgctgtgctagtattctttgtgcccatgatggggctgtccctggtgcaccgttttgggaagcatgccccacctgctattcatcttcttatggccaatgtctacctttttgtgcctcccatgcttaacccaatcatatacagcattaagaccaaggagatccaccgtgccattatcaaactcctaggtcttaaaaaggccagtaaatga

SEQ ID NO: 269 - protein, 317 aa, Homo sapiens
MSQVTNTTQEGIYFILTDIPGFEASHIWISIPVCCLYTISIMGNTTILTVIRTEPSVHQRMYLFLSMLALTDLGLTLTTLPTVMQLLWFNVRRISSEACFAQFFFLHGFSFMESSVLLAMSVDCYVAICCPLHYASILTNEVIGRTGLAIICCCVLAVLPSLFLLKRLPFCHSHLLSRSYCLHQDMIRLVCADIRLNSWYGFALALLIIIVDPLLIVISYTLILKNILGTATWAERLRALNNCLSHILAVLVLYIPMVGVSMTHRFAKHASPLVHVIMANIYLLAPPVMNPIIYSVKNKQIQWGMLNFLSLKNMHSR

SEQ ID NO: 270 - DNA, 954 bp, Homo sapiens
atgtcccaggtgactaacaccacacaagaaggcatctacttcatcctcacggacatccctggatttgaggcctcccacatctggatctccatccccgtctgctgtctctacaccatctccatcatgggcaataccaccatcctcactgtcattcgcacagagccatctgtccaccagcgcatgtatctgtttctctccatgctggccctgacggacctgggtctcaccctcaccaccctacccacagtcatgcagcttctctggttcaacgttcgtagaatcagctctgaggcctgttttgctcagtttttcttccttcatggattctcctttatggagtcttctgtcctcctggctatgtccgttgactgctatgtggccatctgctgtcccctccattatgcctccatcctcaccaatgaagtcattggtagaactgggttagccatcatttgctgctgtgttctggcggttcttccctcccttttcttactcaagcgactgcctttctgccactcccaccttctctctcgctcctattgcctccaccaggatatgatccgcctggtctgtgctgacatcaggctcaacagctggtatggatttgctcttgccttgctcattattatcgtggatcctctgctcattgtgatctcctatacacttattctgaaaaatatcttgggcacagccacctgggctgagcgactccgtgccctcaataactgcctgtcccacattctagctgtcctggtcctctacattcccatggttggtgtatctatgactcatcgctttgccaagcatgcctctccactggtccatgttatcatggccaatatctacctgctggcacccccggtgatgaaccccatcatttacagtgtaaagaacaagcagatccaatggggaatgttaaatttcctttccctcaaaaatatgcattcaagatga

SEQ ID NO: 271 - protein, 320 aa, Homo sapiens
MPSASAMIIFNLSSYNPGPFILVGIPGLEQFHVWIGIPFCIIYIVAVVGNCILLYLIVVEHSLHEPMFFFLSMLAMTDLILSTAGVPKALSIFWLGAREITFPGCLTQMFFLHYNFVLDSAILMAMAFDHYVAICSPLRYTTILTPKTIIKSAMGISFRSFCIILPDVFLLTCLPFCRTRIIPHTYCEHIGVAQLACADISINFWYGFCVPIMTVISDVILIAVSYAHILCAVFGLPSQDACQKALGTCGSHVCVILMFYTPAFFSILAHRFGHNVSRTFHIMFANLYIVIPPALNPMVYGVKTKQIRDKVILLFSKGTG

SEQ ID NO: 272 - DNA, 963 bp, Homo sapiens
atgccatctgcctctgccatgatcattttcaacctgagcagttacaatccaggacccttcattctggtagggatcccaggcctggagcaattccatgtgtggattggaattcccttctgtatcatctacattgtagctgttgtgggaaactgcatccttctctacctcattgtggtggagcatagtcttcatgaacccatgttcttctttctctccatgctggccatgactgacctcatcttgtccacagctggtgtgcctaaagcactcagtatcttttggctaggggctcgcgaaatcacattcccaggatgccttacacaaatgttcttccttcactataactttgtcctggattcagccattctgatggccatggcatttgatcactatgtagctatctgttctcccttgagatataccaccatcttgactcccaagaccatcatcaagagtgctatgggcatctcctttcgaagcttctgcatcatcctgccagatgtattcttgctgacatgcctgcctttctgcaggacacgcatcataccccacacatactgtgagcatataggtgttgcccagctcgcctgtgctgatatctccatcaacttctggtatggcttttgtgttcccatcatgacggtcatctcagatgtgattctcattgctgtttcctacgcacacatcctctgtgctgtctttggccttccctcccaagatgcctgccagaaagccctcggcacttgtggttctcatgtctgtgtcatcctcatgttttatacacctgcctttttctccatcctcgcccatcgctttggacacaatgtctctcgcaccttccacatcatgtttgccaatctctacattgttatcccacctgcactcaaccccatggtttacggagtgaagaccaagcagatcagagataaggttatacttttgttttctaagggtacaggatga

SEQ ID NO: 273 - protein, 318 aa, Homo sapiens
MPTVNHSGTSHTVFHLLGIPGLQDQHMWISIPFFISYVTALLGNSLLIFIILTKRSLHEPMYLFLCMLAGADIVLSTCTIPQALAIFWFRAGDISLDRCITQLFFIHSTFISESGILLVMAFDHYIAICYPLRYTTILTNALIKKICVTVSLRSYGTIFPIIFLLKRLTFCQNNIIPHTFCEHIGLAKYACNDIRINIWYGFSILMSTVVLDVVLIFISYMLILHAVFHMPSPDACHKALNTFGSHVCIIILFYGSGIFTILTQRFGRHIPPCIHIPLANVCILAPPMLNPIIYGIKTKQIQEQVVQFLFIKQKITLV

SEQ ID NO: 274 - DNA, 957 bp, Homo sapiens
atgcctactgtaaaccacagtggcactagccacacagtcttccacttgctgggcatccctggcctacaggaccagcacatgtggatttctatcccattcttcatttcctatgtcaccgcccttcttgggaacagcctgctcatcttcattatcctcacaaagcgcagcctccatgaacccatgtacctcttcctctgcatgctggctggagcagacattgtcctctccacgtgcaccattcctcaggccttagctatcttctggttccgtgctggggacatctccctggatcgttgcatcactcagctcttcttcatccattccaccttcatctctgagtcagggatcttgctggtgatggcctttgaccactatattgccatatgctacccactgaggtacaccaccattcttacaaatgctctgatcaagaaaatttgtgtgactgtctctctgagaagttatggtacaattttccctatcatatttcttttaaaaagattgactttctgccagaataatattattccacacaccttttgtgaacacattggcctagccaaatatgcatgtaatgacattcgaataaacatttggtatgggttttccattctaatgtcgacggtggtcttagatgttgtactaatttttatttcctatatgctgattctccatgctgtcttccacatgccttctccagatgcttgccacaaagctctcaacacatttggctcccatgtctgcatcatcatcctcttttatgggtctggcatcttcacaatccttacccagaggtttggacgccacattccaccttgtatccacatcccgttggctaatgtctgcattctggctccacctatgctgaatcccattatttatgggatcaaaaccaagcaaatccaggaacaggtggttcagtttttgtttataaaacagaaaataactttggtttaa

SEQ ID NO: 275 - protein, 311 aa, Homo sapiens
MSNASLLTAFILMGLPHAPALDAPLFGVFLVVYVLTVLGNLLILLVIRVDSHLHTTMYYFLTNLSFIDMWFSTVTVPKLLMTLVFPSGRAISFHSCMAQLYFFHFLGGTECFLYRVMSCDRYLAISYPLRYTSMMTGRSCTLLATSTWLSGSLHSAVQAILTFHLPYCGPNWIQHYLCDAPPILKLACADTSAIETVIFVTVGIVASGCFVLIVLSYVSIVCSILRIRTSEGKHRAFQTCASHCIVVLCFFGPGLFIYLRPGSRKAVDGVVAVFYTVLTPLLNPVVYTLRNKEVKKALLKLKDKVAHSQSK

SEQ ID NO: 276 - DNA, 936 bp, Homo sapiens
atgtccaacgccagcctactgacagcgttcatcctcatgggccttccccatgccccagcgctggacgcccccctctttggagtcttcctggtggtttacgtgctcactgtgctggggaacctcctcatcctgctggtgatcagggtggattctcacctccacaccaccatgtactacttcctcaccaacctgtcgttcattgacatgtggttctccactgtcacggtgcccaaattgctgatgactttggtgttcccaagtggcagggctatctccttccacagctgcatggctcagctctatttctttcacttcctagggggcaccgagtgtttcctctacagggtcatgtcctgtgatcgctacctggccatcagttacccgctcaggtacaccagcatgatgactgggcgctcgtgtactcttctggccaccagcacttggctcagtggctctctgcactctgctgtccaggccatattgactttccatttgccctactgtggacccaactggatccagcactatttgtgtgatgcaccgcccatcctgaaactggcctgtgcagacacctcagccatagagactgtcatttttgtgactgttggaatagtggcctcgggctgctttgtcctgatagtgctgtcctatgtgtccatcgtctgttccatcctgcggatccgcacctcagaggggaagcacagagcctttcagacctgtgcctcccactgtatcgtggtcctttgcttctttggccctggtcttttcatttacctgaggccaggctccaggaaagctgtggatggagttgtggccgttttctacactgtgctgacgccccttctcaaccctgttgtgtacaccctgaggaacaaggaggtgaagaaagctctgttgaagctgaaagacaaagtagcacattctcagagcaaatag

SEQ ID NO: 277 - protein, 308 aa, Homo sapiens
MELGNVTRVKEFIFLGLTQSQDQSLVLFLFLCLVYMTTLLGNLLIMVTVTCESRLHTPMYFLLRNLAILDICFSSTTAPKVLLDLLSKKKTISYTSCMTQIFLFHLLGGADIFSLSVMAFDCYMAISKPLHYVTIMSRGQCTALISASWMGGFVHSIVQISLLLPLPFCGPNVLDTFYCDVPQVLKLTCTDTFALEFLMISNNGLVTTLWFIFLLVSYTVILMTLRSQAGGGRRKAISTCTSPHHCGDPAFCALHLCLCPALHCPPHRKGHLCHLHCHLPSAEPFDLHSEEPGNEVSHEKTEEKTRAF

SEQ ID NO: 278 - DNA, 927 bp, Homo sapiens
atggagttgggaaatgtcaccagagtaaaagaatttatatttctgggacttactcaatcccaagaccagagtttggtcttgtttctttttttatgtcttgtgtacatgacgactctgctgggaaacctcctcatcatggtcaccgtgacctgtgagtctcgccttcacacccccatgtacttcctgctccgcaatctagccatccttgacatctgcttctcctccacaactgctcctaaagtcttgctggaccttctgtcaaagaaaaagaccatatcctatacaagctgcatgacacagatatttctcttccacctccttggtggggcagacattttttctctctctgtgatggcgtttgactgctacatggccatctccaagcccctgcactatgtgaccatcatgagtagagggcaatgcactgccctcatctctgcctcttggatggggggctttgtccactccatcgtgcagatctccctgttgctgcctctccctttctgtggacccaatgttcttgacactttctactgcgatgtcccccaggtcctcaaactcacttgcactgacacttttgctcttgagttcttgatgatttccaacaatggcctggtcactaccctgtggtttatcttcctgcttgtgtcctacacagtcatcctaatgacgctgaggtctcaggcaggagggggcaggaggaaagccatctccacttgcacctccccacatcactgtggtgaccctgcattttgtgccctgcatctatgtctatgcccggcccttcactgccctccccacagaaaaggccatctctgtcaccttcactgtcatctcccctctgctgaaccctttgatctacactctgaggaaccaggaaatgaagtcagccatgagaagactgaagagaagactcgtgccttctga

SEQ ID NO: 279 - protein, 315 aa, Homo sapiens
MFSPNHTIVTEFILLGLTDDPVLEKILFGVFLAIYLITLAGNLCMILLIRTNSHLQTPMYFFLGHLSFVDICYSSNVTPNMLHNFLSEQKTISYAGCFTQCLLFIALVITEFYILASMALDRYVAICSPLHYSSRMSKNICVCLVTIPYMYGFLSGFSQSLLTFHLSFCGSLEINHFYCADPPLIMLACSDTRVKKMAMFVVAGFNLSSSLFIILLSYLFIFAAIFRIRSAEGRHKAFSTCASHLTIVTLFYGTLFCMYVRPPSEKSVEESKITAVFYTFLSPMLNPLIYSLRNTDVILAMQQMIRGKSFHKIAV

SEQ ID NO: 280 - DNA, 948 bp, Homo sapiens
atgttctccccaaaccacaccatagtgacagaattcattctcttgggactgacagacgacccagtgctagagaagatcctgtttggggtattccttgcgatctacctaatcacactggcaggcaacctgtgcatgatcctgctgatcaggaccaattcccacctgcaaacacccatgtatttcttccttggccacctctcctttgtagacatttgctattcttccaatgttactccaaatatgctgcacaatttcctctcagaacagaagaccatctcctacgctggatgcttcacacagtgtcttctcttcatcgccctggtgatcactgagttttacatccttgcttcaatggcattggatcgctatgtagccatttgcagccctttgcattacagttccaggatgtccaagaacatctgtgtctgtctggtcactatcccttacatgtatgggtttcttagtgggttctctcagtcactgctaacctttcacttatccttctgtggctcccttgaaatcaatcatttctactgcgctgatcctcctcttatcatgctggcctgctctgacacccgtgtcaaaaagatggcaatgtttgtagttgcaggctttaatctctcaagctctctcttcatcattcttctgtcctatcttttcatttttgcagcgatcttcaggatccgttctgctgaaggcaggcacaaagccttttctacgtgtgcttcccacctgacaatagtcactttgttttatggaaccctcttctgcatgtacgtaaggcctccatcagagaagtctgtagaggagtccaaaataactgcagtcttttatacttttttgagcccaatgctgaacccattgatctatagcctacggaacacagatgtaatccttgccatgcaacaaatgattaggggaaaatcctttcataaaattgcagtttag

SEQ ID NO: 281 - protein, 314 aa, Homo sapiens
MDQINHTNVKEFFFLELTRSRELEFFLFVVFFAVYVATVLGNALIVVTITCESRLHTPMYFLLRNKSVLDIVFSSITVPKFLVDLLSDRKTISYNDCMAQIFFFHFAGGADIFFLSVMAYDRYLAIAKPLHYVTMMRKEVWVALVVASWVSGGLHSIIQVILMLPFPFCGPNTLDAFYCYVLQVVKLACTDTFALELFMISNNGLVTLLWFLLLLGSYTVILVMLRSHSGEGRNKALSTCTSHMLVVTLHFVPCVYIYCRPFMTLPMDTTISINNTVITPMLNPIIYSLRNQEMKSAMQRLQRRLGPSESRKWG

SEQ ID NO: 282 - DNA, 945 bp, Homo sapiens
atggaccagatcaaccacactaatgtgaaggagtttttcttcctggaacttacacgttcccgagagctggagtttttcttgtttgtggtcttctttgctgtgtatgtagcaacagtcctgggaaatgcactcattgtggtcactattacctgtgagtcccgcctacacactcctatgtactttctcctgcggaacaaatcagtcctggacatcgttttttcatctatcaccgtccccaagttcctggtggatcttttatcagacaggaaaaccatctcctacaatgactgcatggcacagatctttttcttccactttgctggtggggcagatatttttttcctctctgtgatggcctatgacagataccttgcaatcgccaagcccctgcactatgtgaccatgatgaggaaagaggtgtgggtggccttggtggtggcttcttgggtgagtggtggtttgcattcaatcatccaggtaattctgatgcttccattccccttctgtggccccaacacactggatgccttctactgttatgtgctccaggtggtaaaactggcctgcactgacacctttgctttggagcttttcatgatctctaacaacggactggtgaccctgctctggttcctcctgctcctgggctcctacactgtcattctggtgatgctgagatcccactctggggaggggcggaacaaggccctctccacgtgcacgtcccacatgctggtggtgactcttcacttcgtgccttgtgtttacatctactgccggcccttcatgacgctgcccatggacacaaccatatccattaataacacggtcattacccccatgctgaaccccatcatctattccctgagaaatcaagagatgaagtcagccatgcagaggctgcagaggagacttgggccttccgagagcagaaaatgggggtga

SEQ ID NO: 283 - protein, 311 aa, Homo sapiens
  MOD_RES (253): Any amino acid
MSKTSLVTAFILTGLPHAPGLDAPLFGIFLVVYVLTVLGNLLILLVIRVDSHLHTPMYYFLTNLSFIDMWFSTVTVPKMLMTLVSPSGRAISFHSCVAQLYFFHFLGSTECFLYTVMSYDRYLAISYPLRYTSMMSGSRCALLATSTWLSGSLHSAVQTILTFHLPYCGPNQIQHYLCDAPPILKLACADTSANEMVIFVDIGLVASGCFLLIVLSYVSIVCSILRIHTSEGRHRAFQTCASHCIVVLCFFVXCVFIYLRPGSRDVVDGVVAIFYTVLTPLLNPVVYTLRNKEVKKAVLKLRDKVAHSQGE

SEQ ID NO: 284 - DNA, 936 bp, Homo sapiens
  modifed_base (756)..(757): a, t, c, or g
atgtccaagaccagcctcgtgacagcgttcatcctcacgggccttccccatgccccagggctggacgccccactctttggaatcttcctggtggtttacgtgctcactgtgctggggaacctcctcatcctgctggtgatcagggtggattctcacctccacacccccatgtactacttcctcaccaacctgtccttcattgacatgtggttctccactgtcacggtgcccaaaatgctgatgaccttggtgtccccaagcggcagggctatctccttccacagctgcgtggctcagctctattttttccacttcctggggagcaccgagtgtttcctctacacagtcatgtcctatgatcgctacttggccatcagttacccgctcaggtacaccagcatgatgagtgggagcagatgtgccctcctggccaccagcacttggctcagtggctctctgcactctgctgtccagaccatattgactttccatttgccctactgtggacccaaccagatccagcactatttgtgtgatgcaccgcccatcctgaaactggcctgtgcagacacctcagccaacgagatggtcatctttgtggacattgggctagtggcctcgggctgctttctcctgatagtgctgtcttatgtgtccatcgtctgttccatcctgcggatccacacctcagaggggaggcacagagcctttcagacctgtgcctcccactgcatcgtggtcctttgcttttttgtnncctgtgttttcatttacctgagaccaggctccagggacgtcgtggatggagttgtggccattttctacactgtgctgacaccccttctcaaccctgttgtgtacaccctgagaaacaaggaggtgaagaaagctgtgttgaaactgagagacaaagtagcacattctcagggagaataa

SEQ ID NO: 285 - protein, 331 aa, Homo sapiens
  MOD_RES (253): Any amino acid
MCWAMPSPFTGSSTRNMESRNQSTVTEFIFTGFPQLQDGSLLYFFPLLFIYTFIIIDNLLIFSAVRLDTHLGNPMYNFISIFSFLEIWYTTATIPKMLSNLISEKKAISMTGCILQMYFFHSLENSEGILLTTMAIDRYVAICNPLRYQMIMTPRLCAHLSAGSCLFGFLILLPEIVMISTLPFCGPNQIHQIFCDLVPVLSLACTDTSMILIEDVIHAVTIIITFLIIALSYVRIVTVILRIPSSEGRQKAXSTCAGHLMVFLIFFGSVSLMYLRFSNTYPPVLDTAIALMFTVLAPFFNPIIYSLRNKDMNNAIKKLFCLQKVLNKPGG

SEQ ID NO: 286 - DNA, 996 bp, Homo sapiens
  modifed_base (757): a, t, c, or g
atgtgctgggctatgccctctccatttacaggtagctctactagaaatatggagagcagaaaccaatcaacagtgactgaatttatcttcactggattccctcagcttcaggatggtagtctcctgtacttctttcctttacttttcatctatacttttattatcattgataacttattaatcttctctgctgtaaggctggacacccatctgggcaaccccatgtataattttatcagtatattttcctttctggagatctggtacaccacagccaccattcccaagatgctctccaacctcatcagtgaaaagaaggccatctcaatgactggctgcatcttgcagatgtatttcttccactcacttgaaaactcagaggggatcttgctgaccaccatggccattgacagatacgttgccatctgcaaccctcttcgctatcaaatgatcatgaccccccggctctgtgctcacctctctgcaggttcctgcctcttcggtttccttatcctgcttcccgagattgtgatgatttccacactgcctttctgtgggcccaaccaaatccatcagatcttctgtgacttggtccctgtgctaagcctggcctgtacagacacgtccatgattctgattgaggatgtgattcatgctgtgaccatcatcattaccttcctaatcattgccctgtcctatgtaagaattgtcactgtgatattgaggattccctcttctgaagggaggcaaaaggctntttctacctgtgcaggccacctcatggtcttcctgatattctttggcagtgtatcactcatgtacttgcgtttcagcaacacttatccaccagttttggacacagccattgcactgatgtttactgtacttgctccattcttcaatcccatcatttatagcctgagaaacaaggacatgaacaatgcaattaaaaaactgttctgtcttcaaaaagtgttgaacaagcctggaggttaa

SEQ ID NO: 287 - protein, 308 aa, Homo sapiens [sequence omitted]

SEQ ID NO: 288 - DNA, 927 bp, Homo sapiens
atggccatggacaatgtcacagcagtgtttcagtttctccttattggcatttctaactatcctcaatggagagacacgtttttcacattagtgctgataatttacctcagcacattgttggggaatggatttatgatctttcttattcactttgaccccaacctccacactccaatctacttcttccttagtaacctgtctttcttagacctttgttatggaacagcttccatgccccaggctttggtgcattgtttctctacccatccctacctctcttatccccgatgtttggctcaaacgagtgtctccttggctttggccacagcagagtgcctcctactggctgccatggcctatgaccgtgtggttgctatcagcaatcccctgcgttattcagtggttatgaatggcccagtgtgtgtctgcttggttgctacctcatgggggacatcacttgtgctcactgccatgctcatcctatccctgaggcttcacttctgtggggctaatgtcatcaaccattttgcctgtgagattctctccctcattaagctgacctgttctgataccagcctcaatgaatttatgatcctcatcaccagtatcttcaccctgctgctaccatttgggtttgttctcctctcctacatacgaattgctatggctatcataaggattcgctcactccagggcaggctcaaggcctttaccacatgtggctctcacctgaccgtggtgacaatcttctatgggtcagccatctccatgtatatgaaaactcagtccaagtcctcccctgaccaggacaagtttatctcagtgttttatggagctttgacacccatgttgaaccccctgatatatagcctgagaaaaaaagatgttaaacgggcaataaggaaagttatgttgaaaaggacatga

SEQ ID NO: 289 - protein, 312 aa, Homo sapiens
MKAGNFSDTPEFFLLGLSGDPELQPILFMLFLSMYLATMLGNLLIILAVNSDSHLHTPMYFLLSILSLVDICFTSTTMPKMLVNIQAQAQSINYTGCLTQICFVLVFVGLENGILVMMAYDRFVAICHPLRYNVIMNPKLCGLLLLLSFIVSVLDALLHTLMVLQLTFCIDLEIPHFFCELAHILKLACSDVLINNILVYLVTSLLGVVPLSGIIFSYTRIVSSVMKIPSAGGKYKAFSICGSHLIVVSLFYGTGFGVYLSSGATHSSRKGAIASVMYTVVTPMLNPLIYSLRNKDMLKALRKLISRIPSFH

SEQ ID NO: 290 - DNA, 939 bp, Homo sapiens
atgaaagcaggaaacttctcagacactccagaattctttctcttgggattgtcaggggatccggagctgcagcccatcctcttcatgctgttcctgtccatgtacctggccacaatgctggggaacctgctcatcatcctggccgtcaactctgactcccacctccacacccccatgtacttcctcctctctatcctgtccttggtcgacatctgtttcacctccaccacgatgcccaagatgctggtgaacatccaggcacaggctcaatccatcaattacacaggctgcctcacccaaatctgctttgtcctggtttttgttggattggaaaatggaattctggtcatgatggcctatgatcgatttgtggccatctgtcacccactgaggtacaatgtcatcatgaaccccaaactctgtgggctgctgcttctgctgtccttcatcgttagtgtcctggatgctctgctgcacacgttgatggtgctacagctgaccttctgcatagacctggaaattccccactttttctgtgaactagctcatattctcaagctcgcctgttctgatgtcctcatcaataacatcctggtgtatttggtgaccagcctgttaggtgttgttcctctctctgggatcattttctcttacacacgaattgtctcctctgtcatgaaaattccatcagctggtggaaagtataaagctttttccatctgcgggtcacatttaatcgttgtttccttgttttatggaacagggtttggggtgtaccttagttctggggctacccactcctccaggaagggtgcaatagcatcagtgatgtataccgtggtcacccccatgctgaacccactcatttacagcctgagaaacaaggacatgttgaaggctttgaggaaactaatatctaggataccatctttccattga

SEQ ID NO: 291 - protein, 311 aa, Homo sapiens
MGPRNQTAVSEFLLMKVTEDPELKLIPFSLFLSMYLVTILGNLLILLAVISDSHLHTPMYFLLFNLSFTDICLTTTTVPKILVNIQAQNQSITYTGCLTQICLVLVFAGLESCFLAVMAYDRYVAICHPLRYTVLMNVHFWGLLILLSMFMSTMDALVQSLMVLQLSFCKNVEIPLFFCEVVQVIKLACSDTLINNILIYFASSVFGAIPLSGIIFSYSQIVTSVLRMPSARGKYKAFSTCGCHLSVFSLFYGTAFGVYISSAVAESSRITAVASVMYTVVPQMMNPFIYSLRNKEMKKALRKLIGRLFPF

SEQ ID NO: 292 - DNA, 936 bp, Homo sapiens
atgggacccagaaaccaaacagctgtttcagaatttcttctcatgaaagtgacagaggacccagaactgaagttaatccctttcagcctgttcctgtccatgtacctggtcaccatcctggggaacctgctcattctcctggctgtcatctctgactcccacctccacacccccatgtacttccttctctttaatctctcctttactgacatctgtttaaccacaaccacagtcccaaagatcctagtgaacatccaagctcagaatcagagtatcacttacacaggctgcctcacccagatctgtcttgtcttggtttttgctggcttggaaagttgctttcttgcagtcatggcctacgaccgctatgtggccatttgccacccactgaggtacacagtcctcatgaatgtccatttctggggcttgctgattcttctctccatgttcatgagcactatggatgccctggttcagagtctgatggtattgcagctgtccttctgcaaaaacgttgaaatccctttgttcttctgtgaagtcgttcaggtcatcaagctcgcctgttctgacaccctcatcaacaacatcctcatatattttgcaagtagtgtatttggtgcaattcctctctctggaataattttctcttattctcaaatagtcacctctgttctgagaatgccatcagcaagaggaaagtataaagcgttttccacctgtggctgtcacctctctgttttttccttgttctatgggacagcttttggggtgtacattagttctgctgttgctgagtcttcccgaattactgctgtggcttcagtgatgtacactgtggtccctcaaatgatgaaccccttcatctacagcctgagaaataaggagatgaagaaagctttgaggaaacttattggtaggctgtttcctttttag

SEQ ID NO: 293 - protein, 345 aa, Homo sapiens
MPMQLLLTDFIIFSIRFIINSMEARNQTAISKFLLLGLIEDPELQPVLFSLFLSMYLVTILGNLLILLAVISDSHLHTPMYFFLSNLSFLDICLSTTTIPKMLVNIQAQNRSITYSGCLTQICFVLFFAGLENCLLAAMAYDRYVAICHPLRYTVIMNPRLCGLLILLSLLTSVVNALLLSLMVLRLSFCTDLEIPLFFCELAQVIQLTCSDTLINNILIYFAACIFGGVPLSGIILSYTQITSCVLRMPSASGKHKAVSTCGSHLSIVLLFYGAGLGVYISSVVTDSPRKTAVASVMYSVFPQMVNPFIYSLRNKDMKGTLRKFIGRIPSLLWCAICFGFRFLE

SEQ ID NO: 294 - DNA, 1038 bp, Homo sapiens
atgccgatgcagctgctgcttacagattttattatcttttccatcagattcatcatcaacagcatggaagcgagaaaccaaacagctatttcaaaattccttctcctgggactgatagaggatccggaactgcagcccgtccttttcagcctgttcctgtccatgtacttggtcaccatcctggggaacctgctcatcctcttggctgtcatctctgactctcacctccacacccccatgtacttcttcctctccaatctctcctttttggacatttgtttaagcacaaccacgatcccaaagatgctggtgaacatccaagctcagaatcggagcatcacgtactcaggctgcctcacccagatctgctttgtcttgttttttgctggcttggaaaattgtctccttgcagcaatggcctatgaccgctatgtggccatttgtcacccccttagatacacagtcatcatgaacccccgcctctgtggcctgctgattcttctctctctgttgactagtgttgtgaatgcccttcttctcagcctgatggtgttgaggctgtccttctgcacagacctggaaatcccgctcttcttctgtgaactggctcaggtcatccaactcacctgttcagacaccctcatcaataacatcctgatatattttgcagcttgcatatttggtggtgttcctctgtctggaatcattttgtcttacactcagatcacctcctgtgttttgagaatgccatcagcaagtggaaagcacaaagcagtttccacctgtgggtctcacctctccattgttctcttgttctatggggcaggtttgggggtgtacattagttctgtggttactgactcacctaggaagactgcagtggcttcagtgatgtattctgtgttccctcaaatggtgaacccctttatctatagtctgaggaataaggacatgaaaggaaccttgaggaagttcatagggaggataccttctcttctgtggtgtgccatttgctttggattcaggtttctagagtaa

SEQ ID NO: 295 - protein, 313 aa, Homo sapiens
MEPRNQTSASQFILLGLSEKPEQETLLFSLFFCMYLVMVVGNLLIILAISIDSHLHTPMYFFLANLSLVDFCLATNTIPKMLVSLQTGSKAISYPCCLIQMYFFHFFGIVDSVIIAMMAYDRFVAICHPLHYAKIMSLRLCRLLVGALWAFSCFISLTHILLMARLVFCGSHEVPHYFCDLTPILRLSCTDTSVNRIFILIVAGMVIATPFVCILASYARILVAIMKVPSAGGRKKAFSTCSSHLSVVALFYGTTIGVYLCPSSVLTTVKEKASAVMYTAVTPMLNPFIYSLRNRDLKGALRKLVNRKITSSS

SEQ ID NO: 296 - DNA, 942 bp, Homo sapiens
atggaaccaagaaaccaaaccagtgcatctcaattcatcctcctgggactctcagaaaagccagagcaggagacgcttctcttttccctgttcttctgcatgtacctggtcatggtcgtggggaacctgctcatcatcctggccatcagcatagactcccacctccacacccccatgtacttcttcctggccaacctgtccctggttgatttctgtctggccaccaacaccatccctaagatgctggtgagccttcaaaccgggagcaaggccatctcttatccctgctgcctgatccagatgtacttcttccatttctttggcatcgtggacagcgtcataatcgccatgatggcttatgaccggttcgtggccatctgccacccattgcactacgccaagatcatgagcctacgcctctgtcgcctgctggtcggcgccctctgggcgttttcctgcttcatctcactcactcacatcctcctgatggcccgtctcgttttctgcggcagccatgaggtgcctcactacttctgcgacctcactcccatcctccgactttcgtgcacggacacctctgtgaataggatcttcatcctcattgtggcagggatggtgatagccacgccctttgtctgcatcctggcctcctatgctcgcatccttgtggccatcatgaaggtcccctctgcaggcggcaggaagaaagccttctccacctgcagctcccacctgtctgtggttgctctcttctatgggaccaccattggcgtctatctgtgtccctcctcggtcctcaccactgtgaaggagaaagcttctgcggtgatgtacacagcagtcacccccatgctgaatcccttcatctacagcttgaggaacagagacctgaaaggggctctcaggaagctggtcaacagaaagatcacctcatcttcctga

SEQ ID NO: 297 - protein, 317 aa, Homo sapiens
MMRLMKEVRGRNQTEVTEFLLLGLSDNPDLQGVLFALFLLIYMANMVGNLGMIVLIKIDLCLHTPMYFFLSSLSFVDASYSSSVTPKMLVNLMAENKAISFHGCAAQFYFFGSFLGTECFLLAMMAYDRYAAIWNPLLYPVLVSGRICFLLIATSFLAGCGNAAIHTGMTFRLSFCGSNRINHFYCDTPPLLKLSCSDTHFNGIVIMAFSSFIVISCVMIVLISYLCIFIAVLKMPSLEGRHKAFSTCASYLMAVTIFFGTILFMYLRPTSSYSMEQDKVVSVFYTVIIPVLNPLIYSLKNKDVKKALKKILWKHIL

SEQ ID NO: 298 - DNA, 954 bp, Homo sapiens
atgatgagacttatgaaagaggttcgaggcagaaatcaaacagaagtaacagaatttctcctcttaggactttccgacaatccagatctacaaggagtcctctttgcattgtttctgttgatctatatggcaaacatggtgggcaatttggggatgattgtattgattaagattgatctctgtctccacacccccatgtatttctttctcagtagcctctcttttgtagatgcctcttactcttcttccgtcactcccaagatgctggtgaacctcatggctgagaataaggccatttcttttcatggatgtgctgcccagttctacttctttggctccttcctggggactgagtgcttcctgttggccatgatggcatatgaccgctatgcagccatttggaaccccctgctctacccagttctcgtgtctgggagaatttgctttttgctaatagctacctccttcttagcaggttgtggaaatgcagccatacatacagggatgacttttaggttgtccttttgtggttctaataggatcaaccatttctactgtgacaccccgccactgctcaaactctcttgctctgatacccacttcaatggcattgtgatcatggcattctcaagttttattgtcatcagctgtgttatgattgtcctcatttcctacctgtgtatcttcattgccgtcttgaagatgccttcgttagagggcaggcacaaagccttctccacctgtgcctcttacctcatggctgtcaccatattctttggaacaatcctcttcatgtacttgcgccctacatctagctactcaatggagcaagacaaggttgtctctgtcttttatacagtaataatccctgtgctaaatcccctcatctatagtttaaaaaataaggatgtaaaaaaggccctaaagaagatcttatggaaacacatcttgtag

SEQ ID NO: 299 - protein, 305 aa, Homo sapiens
MQRSNHTVTEFILLGFTTDPGMQLGLFVVFLGVYSLTVVGNSTLIVLICNDSCLHTPMYFFTGNLSFLDLWYSSVYTPKILVTCISEDKSISFAGCLCQFFFSAGLAYSECYLLAAVAYDRYVAISKPLLYAQAMSIKLCALLVAVSYCGGFINSSIITKKTFSFNFCRENIIDDFFCDLLPLVELACGEKGGYKIMMYFLLASNVICPAVLILASYLFIITSVLRISSSKGYLKAFSTCSSHLTSVTLYYGSILYIYALPRSSYSFDMDKIVSTFYTVVFPMLNLMIYSLRNKDVKEALKKLLP

SEQ ID NO: 300 - DNA, 918 bp, Homo sapiens
atgcagaggagcaatcatacagtgactgagtttatactgctgggcttcaccacagacccaggaatgcagctgggcctcttcgtggtgttcctgggcgtgtactctctcactgtggtaggaaatagcaccctcatcgtgttgatctgtaatgactcctgcctccacacacccatgtattttttcactggaaatctgtcgtttctggatctctggtattcttctgtctacaccccaaagatcctagtgacctgcatctctgaagacaaaagcatctcctttgctggctgcctgtgtcagttcttcttctctgcagggctggcctatagtgagtgctacctgctggctgccgtggcttatgaccgctacgtggccatctccaagcccctgctttatgcccaggccatgtccataaagctgtgtgcattgctggtagcagtctcatattgtggtggctttattaactcttcaatcatcaccaagaaaacgttttcctttaacttctgccgtgaaaacatcattgatgactttttctgtgatttgcttcccttggtggagctggcctgtggcgagaagggcggctataaaattatgatgtacttcctgctggcctccaatgtcatctgccccgcagtgctcatcctggcctcctacctctttatcatcaccagtgtcttgaggatctcctcctccaagggctacctcaaagccttctccacatgctcctcccacctgacctctgtcactttatactatggctccattctctacatctacgctctccccagatctagctattcttttgatatggacaaaatagtttctacattttacactgtggtattccccatgttgaatctcatgatctacagcctaaggaataaggatgtgaaagaggctctgaaaaaacttctcccataa

SEQ ID NO: 301 - protein, 328 aa, Homo sapiens
MFLTERNTTSEATFTLLGFSDYLELQIPLFFVFLAVYGFSVVGNLGMIVIIKINPKLHTPMYFFLNHLSFVDFCYSSIIAPMMLVNLVVEDRTISFSGCLVQFFFFCTFVVTELILFAVMAYDHFVAICNPLLYTVAISQKLCAMLVVVLYAWGVACSLTLACSALKLSFHGFNTINHFFCELSSLISLSYPDSYLSQLLLFTVATFNEISTLLIILTSYAFIIVTTLKMPSASGHRKVFSTCASHLTAITIFHGTILFLYCVPNSKNSRHTVKVASVFYTVVIPLLNPLIYSLRNKDVKDAIRKIINTKYFHIKHRHWYPFNFVIEQ

SEQ ID NO: 302 - DNA, 987 bp, Homo sapiens
atgtttctgacagagagaaatacgacatctgaggccacattcactctcttgggcttctcagattacctggaactgcaaattcccctcttctttgtatttctggcagtctacggcttcagtgtggtagggaatcttgggatgatagtgatcatcaaaattaacccaaaattgcatacccccatgtattttttcctcaaccacctctcctttgtggatttctgctattcctccatcattgctcccatgatgctggtgaacctggttgtagaagatagaaccatttcattctcaggatgtttggtgcaattctttttcttttgcacctttgtagtgactgaattaattctatttgcggtgatggcctatgaccactttgtggccatttgcaatcctctgctctacacagttgccatctcccagaaactctgtgccatgctggtggttgtattgtatgcatggggagtcgcatgttccctgacactcgcgtgctctgctttaaagttatcttttcatggtttcaacacaatcaatcatttcttctgtgagttatcctccctgatatcactctcttaccctgactcttatctcagccagttgcttcttttcactgttgccacttttaatgagataagcacactactcatcattctgacatcttatgcattcatcattgtcaccaccttgaagatgccttcagccagtgggcaccgcaaagtcttctccacctgtgcctcccacctgactgccatcaccatcttccatggcaccatcctcttcctctactgtgtacccaactccaaaaactccaggcacacagtcaaagtggcctctgtgttttacaccgtggtgatccccttgttgaatcccctgatctacagtctgagaaataaagatgttaaggatgcaatccgaaaaataatcaatacaaaatattttcatattaaacataggcattggtatccatttaattttgttattgaacaataa

SEQ ID NO: 303 - protein, 324 aa, Homo sapiens
MAVGRNNTIVTKFILLGLSDHPQMKIFLFMLFLGLYLLTLAWNLSLIALIKMDSHLHMPMYFFLSNLSFLDICYVSSTAPKMLSDIITEQKTISFVGCATQYFVFCGMGLTECFLLAAMAYDRYAAICNPLLYTVLISHTLCLKMVVGAYVGGFLSSFIETYSVYQHDFCGPYMINHFFCDLPPVLALSCSDTFTSEVVTFIVSVVVGIVSVLVVLISYGYIVAAVVKISSATGRTKAFSTCASHLTAVTLFYGSGFFMYMRPSSSYSLNRDKVVSIFYALVIPVVNPIIYSFRNKEIKNAMRKAMERDPGISHGGPFIFMTLG

SEQ ID NO: 304 - DNA, 975 bp, Homo sapiens
atggctgtaggaaggaacaacacaattgtgacaaaattcattctcctgggactttcagaccatcctcaaatgaagattttccttttcatgttatttctggggctctacctcctgacgttggcctggaacttaagcctcattgccctcattaagatggactctcacctgcacatgcccatgtacttcttcctcagtaacctgtccttcctggacatctgctatgtgtcctccaccgcccctaagatgctgtctgacatcatcacagagcagaaaaccatttcctttgttggctgtgccactcagtactttgtcttctgtgggatggggctgactgaatgctttctcctggcagctatggcctatgaccggtatgctgcaatctgcaaccccttgctttacacagtcctcatatcccatacactttgtttaaagatggtggttggcgcctatgtgggtggattccttagttctttcattgaaacatactctgtctatcagcatgatttctgtgggccctatatgatcaaccactttttctgtgacctccctccagtcctggctctgtcctgctctgataccttcaccagcgaggtggtgaccttcatagtcagtgttgtcgttggaatagtgtctgtgctagtggtcctcatctcttatggttacattgttgctgctgttgtgaagatcagctcagctacaggtaggacaaaggccttcagcacttgtgcctctcacctgactgctgtgaccctcttctatggttctggattcttcatgtacatgcgacccagttccagctactccctaaacagggacaaggtggtgtccatattctatgccttggtgatccccgtggtgaatcccatcatctacagttttaggaataaggagattaaaaatgccatgaggaaagccatggaaagggaccccgggatttctcacggtggaccattcatttttatgaccttgggctaa

SEQ ID NO: 305 - protein, 311 aa, Homo sapiens
MEMENCTRVKEFIFLGLTQNREVSLVLFLFLLLVYVTTLLGNLLIMVTVTCESRLHTPMYFLLHNLSIADICFSSITVPKVLVDLLSERKTISFNHCFTQMFLFHLIGGVDVFSLSVMALDRYVAISKPLHYATIMSRDHCIGLTVAAWLGGFVHSIVQISLLLPLPFCGPNVLDTFYCDVHRVLKLAHTDIFILELLMISNNGLLTTLWFFLLLVSYIVILSLPKSQAGEGRRKAISTCTSHITVVTLHFVPCIYVYARPFTALPMDKAISVTFTVISPLLNPLIYTLRNHEMKSAMRRLKRRLVPSDRK

SEQ ID NO: 306 - DNA, 936 bp, Homo sapiens
atggagatggaaaactgcaccagggtaaaagaatttattttccttggcctgacccagaatcgggaagtgagcttagtcttatttcttttcctactcttggtgtatgtgacaactttgctgggaaacctcctcatcatggtcactgttacctgtgaatctcgccttcacacgcccatgtattttttgctccataatttatctattgccgatatctgcttctcttccatcacagtgcccaaggttctggtggaccttctgtctgaaagaaagaccatctccttcaatcattgcttcactcagatgtttctattccaccttattggaggggtggatgtattttctctttcggtgatggcattggatcgatatgtggccatctccaagcccctgcactatgcgactatcatgagtagagaccattgcattgggctcacagtggctgcctggttggggggctttgtccactccatcgtgcagatttccctgttgctcccactccctttctgcggacccaatgttcttgacactttctactgtgatgtccaccgggtcctcaaactggcccatacagacattttcatacttgaactactaatgatttccaacaatggactgctcaccacactgtggtttttcctgctcctggtgtcctacatagtcatattatcattacccaagtctcaggcaggagagggcaggaggaaagccatctccacctgcacctcccacatcactgtggtgaccctgcatttcgtgccctgcatctatgtctatgcccggcccttcactgccctccccatggataaggccatctctgtcaccttcactgtcatctcccctctgctcaaccccttgatctacactctgaggaaccatgagatgaagtcagccatgaggagactgaagagaagacttgtgccttctgatagaaaatag

SEQ ID NO: 307 - protein, 315 aa, Homo sapiens
MSITKAWNSSSVTMFILLGFTDHPELQALLFVTFLGIYLTTLAWNLALIFLIRGDTHLHTPMYFFLSNLSFIDICYSSAVAPNMLTDFFWEQKTISFVGCAAQFFFFVGMGLSECLLLTAMAYDRYAAISSPLLYPTIMTQGLCTRMVVGAYVGGFLSSLIQASSIFRLHFCGPNIINHFFCDLPPVLALSCSDTFLSQVVNFLVVVTVGGTSFLQLLISYGYIVSAVLKIPSAEGRWKACNTCASHLMVVTLLFGTALFVYLRPSSSYLLGRDKVVSVFYSLVIPMLNPLIYSLRNKEIKDALWKVLERKKVFS

SEQ ID NO: 308 - DNA, 948 bp, Homo sapiens
atgtccataaccaaagcctggaacagctcatcagtgaccatgttcatcctcctgggattcacagaccatccagaactccaggccctcctctttgtgaccttcctgggcatctatcttaccaccctggcctggaacctggccctcatttttctgatcagaggtgacacccatctgcacacacccatgtacttcttcctaagcaacttatctttcattgacatctgctactcttctgctgtggctcccaatatgctcactgacttcttctgggagcagaagaccatatcatttgtgggctgtgctgctcagttttttttctttgtcggcatgggtctgtctgagtgcctcctcctgactgctatggcatacgaccgatatgcagccatctccagcccccttctctaccccactatcatgacccagggcctctgtacacgcatggtggttggggcatatgttggtggcttcctgagctccctgatccaggccagctccatatttaggcttcacttttgcggacccaacatcatcaaccacttcttctgcgacctcccaccagtcctggctctgtcttgctctgacaccttcctcagtcaagtggtgaatttcctcgtggtggtcactgtcggaggaacatcgttcctccaactccttatctcctatggttacatagtgtctgcggtcctgaagatcccttcagcagagggccgatggaaagcctgcaacacgtgtgcctcgcatctgatggtggtgactctgctgtttgggacagcccttttcgtgtacttgcgacccagctccagctacttgctaggcagggacaaggtggtgtctgttttctattcattggtgatccccatgctgaaccctctcatttacagtttgaggaacaaagagatcaaggatgccctgtggaaggtgttggaaaggaagaaagtgttttcttag

SEQ ID NO: 309 - protein, 311 aa, Homo sapiens
MEKINNVTEFIFWGLSQSPEIEKVCFVVFSFFYIIILLGNLLIMLTVCLSNLFKSPMYFFLSFLSFVDICYSSVTAPKMIVDLLAKDKTISYVGCMLQLLGVHFFGCTEIFILTVMAYDRYVAICKPLHYMTIMNRETCNKMLLGTWVGGFLHSIIQVALVVQLPFCGPNEIDHYFCDVHPVLKLACTETYIVGVVVTANSGTIALGSFVILLISYSIILVSLRKQSAEGRRKALSTCGSHIAMVVIFFGPCTFMYMRPDTTFSEDKMVAVFYTIITPMLNPLIYTLRNAEVKNAMKKLWGRNVFLEAKGK

SEQ ID NO: 310 - DNA, 936 bp, Homo sapiens
atggaaaaaataaacaacgtaactgaattcattttctggggtctttctcagagcccagagattgagaaagtttgttttgtggtgttttctttcttctacataatcattcttctgggaaatctcctcatcatgctgacagtttgcctgagcaacctgtttaagtcacccatgtatttctttctcagcttcttgtcttttgtggacatttgttactcttcagtcacagctcccaagatgattgttgacctgttagcaaaggacaaaaccatctcctatgtggggtgcatgttgcaactgcttggagtacatttctttggttgcactgagatcttcatccttactgtaatggcctatgatcgttatgtggctatctgtaaacccctacattatatgaccatcatgaaccgggagacatgcaataaaatgttattagggacgtgggtaggtgggttcttacactccattatccaagtggctctggtagtccaactacccttttgtggacccaatgagatagatcactacttttgtgatgttcaccctgtgttgaaacttgcctgcacagaaacatacattgttggtgttgttgtgacagccaacagtggtaccattgctctggggagttttgttatcttgctaatctcctacagcatcatcctagtttccctgagaaagcagtcagcagaaggcaggcgcaaagccctctccacctgtggctcccacattgccatggtcgttatctttttcggcccctgtacttttatgtacatgcgccctgatacgaccttttcagaggataagatggtggctgtattttacaccattatcactcccatgttaaatcctctgatttatacactgagaaatgcagaagtaaagaatgcaatgaagaaactgtggggcagaaatgttttcttggaggctaaagggaaatag

SEQ ID NO: 311 - protein, 310 aa, Homo sapiens
MMDNHSSATEFHLLGFPGSQGLHHILFAIFFFFYLVTLMGNTVIIVIVCVDKRLQSPMYFFLSHLSTLEILVTTIIVPMMLWGLLFLGCRQYLSLHVSLNFSCGTMEFALLGVMAVDRYVAVCNPLRYNIIMNSSTCIWVVIVSWVFGFLSEIWPIYATFQFTFRKSNSLDHFYCDRGQLLKLSCDNTLLTEFILFLMAVFILIGSLIPTIVSYTYIISTILKIPSASGRRKAFSTFASHFTCVVIGYGSCLFLYVKPKQTQGVEYNKIVSLLVSVLTPFLNPFIFTLRNDKVKEALRDGMKRCCQLLKD

SEQ ID NO: 312 - DNA, 933 bp, Homo sapiens
atgatggacaaccactctagtgccactgaattccaccttctaggcttccctgggtcccaaggactacaccacattctttttgctatattctttttcttctatttagtgacattaatgggaaacacggtcatcattgtgattgtctgtgtggataaacgtctgcagtcccccatgtatttcttcctcagccacctctctaccctggagatcctggtcacaaccataattgtccccatgatgctttggggattgctcttcctgggatgcagacagtatctttctctacatgtatcgctcaacttttcctgtgggaccatggagtttgcattacttggagtgatggctgtggaccgttatgtggctgtgtgtaaccctttgaggtacaacatcattatgaacagcagtacctgtatttgggtggtaatagtgtcatgggtgtttggatttctttctgaaatctggcccatctatgccacatttcagtttaccttccgcaaatcaaattcattagaccatttttactgtgaccgagggcaattgctcaaactgtcctgcgataacactcttctcacagagtttatccttttcttaatggctgtttttattctcattggttctttgatccctacgattgtctcctacacctacattatctccaccatcctcaagatcccgtcagcctctggccggaggaaagccttctccacttttgcctcccacttcacctgtgttgtgattggctatggcagctgcttgtttctctacgtgaaacccaagcaaacacagggagttgagtacaataagatagtttccctgttggtttctgtgttaacccccttcctgaatcctttcatctttactcttcggaatgacaaagtcaaagaggccctccgagatgggatgaaacgctgctgtcaactcctgaaagattag

SEQ ID NO: 313 - protein, 399 aa, Homo sapiens
MSFTSLIPSLCFSLTLPFLFCYLSLLPFLSAFLFITRWLLAFLSLFSVSVPVSSVSSSMVLCLYLSVSASPSVFCFSCMQGPILWIMANLSQPSEFVLLGFSSFGELQALLYGPFLMLYLLAFMGNTIIIVMVIADTHLHTPMYFFLGNFSLLEILVTMTAVPRMLSDLLVPHKVITFTGCMVQFYFHFSLGSTSFLILTDMALDRFVAICHPLRYGTLMSRAMCVQLAGAAWAAPFLAMVPTVLSRAHLDYCHGDVINHFFCDNEPLLQLSCSDTRLLEFWDFLMALTFVLSSFLVTLISYGYIVTTVLRIPSASSCQKAFSTCGSHLTLVFIGYSSTIFLYVRPGKAHSVQVRKVVALVTSVLTPFLNPFILTFCNQTVKTVLQGQMQRLKGLCKAQ

SEQ ID NO: 314 - DNA, 1200 bp, Homo sapiens
atgtctttcacttctctcataccctcactctgtttctccttgactctcccattcctgttttgttatctttctttattgccgtttctttctgcttttctgtttatcactcgctggctacttgcctttctctctctattctctgtctctgtccctgtttcttctgtttcaagttcaatggttctctgtctctatctctctgtttctgcctctccgtctgtcttttgtttctcttgcatgcagggccccatactgtggatcatggcaaatctgagccagccctccgaatttgtcctcttgggcttctcctcctttggtgagctgcaggcccttctgtatggccccttcctcatgctttatcttctcgccttcatgggaaacaccatcatcatagttatggtcatagctgacacccacctacatacacccatgtacttcttcctgggcaatttttccctgctggagatcttggtaaccatgactgcagtgcccaggatgctctcagacctgttggtcccccacaaagtcattaccttcactggctgcatggtccagttctacttccacttttccctggggtccacctccttcctcatcctgacagacatggcccttgatcgctttgtggccatctgccacccactgcgctatggcactctgatgagccgggctatgtgtgtccagctggctggggctgcctgggcagctcctttcctagccatggtacccactgtcctctcccgagctcatcttgattactgccatggcgacgtcatcaaccacttcttctgtgacaatgaacctctcctgcagttgtcatgctctgacactcgcctgttggaattctgggactttctgatggccttgacctttgtcctcagctccttcctggtgaccctcatctcctatggctacatagtgaccactgtgctgcggatcccctctgccagcagctgccagaaggctttctccacttgcgggtctcacctcacactggtcttcatcggctacagtagtaccatctttctgtatgtcaggcctggcaaagctcactctgtgcaagtcaggaaggtcgtggccttggtgacttcagttctcaccccctttctcaatccctttatccttaccttctgcaatcagacagttaaaacagtgctacaggggcagatgcagaggctgaaaggcctttgcaaggcacaatga

SEQ ID NO: 315 - protein, 292 aa, Homo sapiens
MVGNLLIWVTTIGSPSLGSLMYFFLAYLSLMDAIYSTAMSPKLMIDLLCDKIAISLSACMGQLFIEHLLGGAEVFLLVVMAYDRYVAISKPLHYLNIMNRLVCILLLVVAMIGGFVHSVVQIVFLYSLPICGPNVIDHSVCDMYPLLELLCLDTYFIGLTVVANGGIICMVIFTFLLISCGVILNFLKTYSQEERHKALPTCISHIIVVALVFVPCIFMYVRPVSNFPFDKLMTVFYSIITLMLNPLIYSLRQSEMKNAMKNLWCEKLSIVRKRVSPTLNIFIPSSKATNRR

SEQ ID NO: 316 - DNA, 879 bp, Homo sapiens
atggtgggaaacctcctcatttgggtgactactattggcagcccctccttgggctccctaatgtacttcttccttgcctacttgtcacttatggatgccatatattccactgccatgtcacccaaattgatgatagacttactctgtgataaaatcgctatttccttgtcagcttgcatgggtcagctcttcatagaacacttacttggtggtgcagaggtcttccttttggtggtgatggcctatgatcgctatgtggctatctctaagccgctgcactatttgaacatcatgaatcgactggtttgcatccttctgttggtggtggccatgattggaggttttgtgcactctgtggttcaaattgtctttctgtacagtctaccaatctgtggccccaatgttattgaccactctgtctgtgacatgtacccattgttggaactgttgtgccttgacacctactttataggactcactgtggttgccaatggtggaataatttgtatggtcatctttacctttctgctaatctcctgtggagtcatcctaaacttccttaaaacttacagtcaggaagagaggcataaagccctgcctacctgcatctcccacatcattgtggttgccctcgtttttgttccctgtatttttatgtatgttagacccgtttccaactttccctttgataaattaatgactgtgttttattcaattatcacactcatgttgaatcctttaatatactcgttgagacaatcagagatgaaaaatgctatgaaaaatctctggtgtgaaaagttaagtatagttagaaaaagagtatctcccacactgaacatatttattcctagttctaaggcaacaaataggcggtaa

SEQ ID NO: 317 - protein, 320 aa, Homo sapiens [sequence omitted]

SEQ ID NO: 318 - DNA, 963 bp, Homo sapiens
atggcagaaactctacaactcaattccaccttcctacacccaaacttcttcatactgactggctttccagggctaggaagtgcccagacttggctgacactggtctttgggcccatttatctgctggccctgctgggcaatggagcactgccggcagtggtgtggatagactccacactgcaccagcccatgtttctactgttggccatcctggcagccacagacctgggcttagccacatctatagccccagggttgctggctgtgctgtggcttgggccccgatctgtgccatatgctgtgtgcctggtccagatgttctttgtacatgcactgactgccatggaatcaggtgtgcttttggccatggcctgtgatcgtgctgcggcaatagggcgtccactgcactaccctgtcctggtcaccaaagcctgtgtgggttatgcagccttggccctggcactgaaagctgtggctattgttgtacctttcccactgctggtggcaaagtttgagcacttccaagccaagaccataggccatacctattgtgcacacatggcagtggtagaactggtggtgggtaacacacaggccaccaacttatatggtctggcactttcactggccatctcaggtatggatattctgggtatcactggctcctatggactcattgcccatgctgtgctgcagctacctacccgggaggcccatgccaaggcctttggtacatgtagttctcacatctgtgtcattctggccttctacatacctggtctcttctcctacctcgcacaccgctttggtcatcacactgtcccaaagcctgtgcacatccttctctccaacatctacttgctgctgccacctgccctcaaccccctcatctatggggcccgcaccaagcagatcagagaccgactcctggaaaccttcacattcagaaaaagcccgttgtaa

SEQ ID NO: 319 - protein, 323 aa, Homo sapiens
MSHTNVTIFHPAVFVLPGIPGLEAYHIWLSIPLCLIYITAVLGNSILIVVIVMERNLHVPMYFFLSMLAVMDILLSTTTVPKALAIFWLQAHNIAFDACVTQGFFVHMMFVGESAILLAMAFDRFVAICAPLRYTTVLTWPVVGRIALAVITRSFCIIFPVIFLLKRLPFCLTNIVPHSYCEHIGVARLACADITVNIWYGFSVPIVMVILDVILIAVSYSLILRAVFRLPSQDARHKALSTCGSHLCVILMFYVPSFFTLLTHHFGRNIPQHVHILLANLYVAVPPMLNPIVYGVKTKQIREGVAHRFFDIKTWCCTSPLGS

SEQ ID NO: 320 - DNA, 972 bp, Homo sapiens
atgagtcacaccaatgttaccatcttccatcctgcagtttttgtccttcctggcatccctgggttggaggcttatcacatttggctgtcaatacctctttgcctcatttacatcactgcagtcctgggaaacagcatcctgatagtggttattgtcatggaacgtaaccttcatgtgcccatgtatttcttcctctcaatgctggccgtcatggacatcctgctgtctaccaccactgtgcccaaggccctagccatcttttggcttcaagcacataacattgcttttgatgcctgtgtcacccaaggcttctttgtccatatgatgtttgtgggggagtcagctatcctgttagccatggcctttgatcgctttgtggccatttgtgccccactgagatatacaacagtgctaacatggcctgttgtggggaggattgctctggccgtcatcacccgaagcttctgcatcatcttcccagtcatattcttgctgaagcggctgcccttctgcctaaccaacattgttcctcactcctactgtgagcatattggagtggctcgtttagcctgtgctgacatcactgttaacatttggtatggcttctcagtgcccattgtcatggtcatcttggatgttatcctcatcgctgtgtcttactcactgatcctccgagcagtgtttcgtttgccctcccaggatgctcggcacaaggccctcagcacttgtggctcccacctctgtgtcatccttatgttttatgttccatccttctttaccttattgacccatcattttgggcgtaatattcctcaacatgtccatatcttgctggccaatctttatgtggcagtgccaccaatgctgaaccccattgtctatggtgtgaagactaagcagatacgtgagggtgtagcccaccggttctttgacatcaagacttggtgctgtacctcccctctgggctcatga

SEQ ID NO: 321 - protein, 345 aa, Homo sapiens
MHFLSQNDLNINLIPHLCLHRHSVIAGAFTIHRHMKIFNSPSNSSTFTGFILLGFPCPREGQILLFVLFTVVYLLTLMGNGSIICAVHWDQRLHAPMYILLANFSFLEICYVTSTVPSMLANFLSDTKIISFSGCFLQFYFFFSLGSTECFFLAVMAFDRYLAICRPLRYPTIMTRRLCTNLVVNCWVLGFIWFLIPIVNISQMSFCGSRIIDHFLCDPAPLLTLTCKKGPVIELVFSVLSPLPVFMLFLFIVGSYALVVRAVLRVPSAAGRRKAFSTCGSHLAVVSLFYGSVLVMYGSPPSKNEAGKQKTVTLFYSVVTPLLNPVIYSLRNKDMRKALKKFWGT

SEQ ID NO: 322 - DNA, 1038 bp, Homo sapiens
atgcattttctttcccaaaatgatttaaatataaatctgattccccatctatgtttgcaccgtcattcagtaattgctggtgcttttacaattcacaggcacatgaaaatcttcaacagccccagcaactccagcaccttcactggcttcatcctcctgggcttcccttgccccagggaggggcagatcctcctctttgtgctcttcactgttgtttacctcctgaccctcatgggcaatggttccatcatctgtgctgtgcactgggatcagagactccacgcccccatgtacatcctgctcgccaacttctccttcttggagatatgttatgtcacctccacagtccccagcatgctggccaacttcctctctgacaccaagatcatctcgttctctggctgcttcctccagttctactttttcttctccttgggctctacagaatgctttttcctggcagttatggcatttgatcgataccttgccatctgtcggcctctacgctatccaaccattatgaccagacgtctctgtaccaatcttgtggtcaattgctgggtacttggtttcatctggttcttgattcctatcgtcaacatctcccaaatgtccttctgtggatctaggattattgaccacttcctatgtgacccagctcctcttctaactctcacttgcaaaaaaggccctgtgatagagcttgtcttttctgtcttaagtcctctgcctgtctttatgctctttctcttcattgtggggtcctatgctctggtcgtgagagctgtgttgagggtcccttcagcagctgggagaagaaaggctttctccacctgtgggtctcacctggctgtggtttcactgttctacggctcagtactggtcatgtatgggagcccaccatctaagaatgaagctggaaagcagaagactgtgactctgttttattctgttgttaccccactgcttaaccctgtgatatatagtcttaggaacaaagatatgagaaaagctctgaagaaattttggggaacataa

SEQ ID NO: 323 - protein, 330 aa, Homo sapiens
MFFIIHSLVTSVFLTALGPQNRTMHFVTEFVLLGFHGQREMQSCFFSFILVLYLLTLLGNGAIVCAVKLDRRLHTPMYILLGNFAFLEIWYISSTVPNMLVNILSEIKTISFSGCFLQFYFFFSLGTTECFFLSVMAYDRYLAICRPLHYPSIMTGKFCIILVCVCWVGGFLCYPVPIVLISQLPFCGPNIIDHLVCDPGPLFALACISAPSTELICYTFNSMIIFGPFLSILGSYTLVIRAVLCIPSGAGRTKAFSTCGSHLMVVSLFYGTLMVMYVSPTSGNPAGMQKIITLVYTAMTPFLNPLIYSLRNKDMKDALKRVLGLTVSQN

SEQ ID NO: 324 - DNA, 993 bp, Homo sapiens
atgttctttattattcattctttggttacttctgtttttctaacagctttgggaccccagaacagaacaatgcattttgtgactgagtttgtcctcctgggtttccatggtcaaagggagatgcagagctgcttcttctcattcatcctggttctctatctcctgacactgctagggaatggagctattgtctgtgcagtgaaattggacaggcggctccacacacccatgtacatccttctgggaaactttgcctttctagagatctggtacatttcctccactgtcccaaacatgctagtcaatatcctctctgagattaaaaccatctccttctctggttgcttcctgcaattctatttctttttttcactgggtacaacagagtgtttctttttatcagttatggcttatgatcggtacctggccatctgtcgtccattacactacccctccatcatgactgggaagttctgtataattctggtctgtgtatgctgggtaggcggatttctctgctatccagtccctattgttcttatctcccaacttcccttctgtgggcccaacatcattgaccacttggtgtgtgacccaggcccattgtttgcactggcctgcatctctgctccttccactgagcttatctgttacaccttcaactcgatgattatctttgggcccttcctctccatcttgggatcttacactctggtcatcagagctgtgctttgtattccctctggtgctggtcgaactaaagctttctccacatgtgggtcccacctaatggtggtgtctctattctatggaacccttatggtgatgtatgtgagcccaacatcagggaacccagcaggaatgcagaagatcatcactctggtatacacagcaatgactccattcttaaatccccttatctatagtcttcgaaacaaagacatgaaagatgctctaaagagagtcctggggttaacagttagccaaaactga

SEQ ID NO: 325 - protein, 324 aa, Homo sapiens
MSFFFVDLRPMNRSATHIVTEFILLGFPGCWKIQIFLFSLFLVIYVLTLLGNGAIIYAVRCNPLLHTPMYFLLGNFAFLEIWYVSSTIPNMLVNILSKTKAISFSGCFLQFYFFFSLGTTECLFLAVMAYDRYLAICHPLQYPAIMTVRFCGKLVSFCWLIGFLGYPIPIFYISQLPFCGPNIIDHFLCDMDPLMALSCAPAPITECIFYTQSSLVLFFTSMYILRSYILLLTAVFQVPSAAGRRKAFSTCGSHLVVVSLFYGTVMVMYVSPTYGIPTLLQKILTLVYSVTTPLFNPLIYTLRNKDMKLALRNVLFGMRIRQNS

SEQ ID NO: 326 - DNA, 975 bp, Homo sapiens
atgtctttcttctttgtagacttaagacccatgaacaggtcagcaacacacatcgtgacagagtttattctcctgggattccctggttgctggaagattcagattttcctcttctcattgtttttggtgatttatgtcttgaccttgctgggaaatggagccatcatctatgcagtgagatgcaacccactactacacacccccatgtactttctgctgggaaattttgccttccttgagatctggtatgtgtcctccactattcctaacatgctagtcaacattctctccaagaccaaggccatctcattttctgggtgcttcctccagttctatttcttcttttcactgggaacaactgaatgtctctttctggcagtaatggcttatgatcgatacctggccatctgccacccactgcagtaccctgccatcatgactgtaaggttctgtggtaagctggtgtctttctgttggcttattggattccttggatacccaattcccattttctacatctcccaactccccttctgtggtcctaatatcattgatcacttcctgtgtgacatggacccattgatggctctatcctgtgccccagctcccataactgaatgtattttctatactcagagctcccttgtcctctttttcactagtatgtacattcttcgatcctatatcctgttactaacagctgtttttcaggtcccttctgcagctggtcggagaaaagccttctctacctgtggttctcatttggttgtggtatctcttttctatgggacagtcatggtaatgtatgtaagtcctacatatgggatcccaactttattgcagaagatcctcacactggtatattcagtaacgactcctctttttaatcctctgatctatactcttcgtaataaggacatgaaactcgctctgagaaatgtcctgtttggaatgagaattcgtcaaaattcgtga

SEQ ID NO: 327 - protein, 291 aa, Homo sapiens
MVGANHSVVSEFVFLGLTNSWEIRLLLLVFSSMFYMASMMGNSLILLTVTSDPHLHSPMYFLLANLSFIDLGVSSVTSPKMIYDLFRKHEVISFGGCIAQIFFIHVIGGVEMVLLIAMAFDRYVAICKPLQYLTIMSPRMCMFFLVAAWVTGLIHSVVQLVFVVNLPFCGPNVSDSFYCDLPRFIKLACTDSYRLEFMVTANSGFISLGSFFILIISYVVIILTVLKHSSAGLSKALSTLSAHVSVVVLFFGPLIFVYTWPSPSTHLDKFLAIFDAVLTPVLNPIIYTFRN

SEQ ID NO: 328 - DNA, 876 bp, Homo sapiens
atggttggggcaaatcactccgtggtgtcagagtttgtgttcctgggactcaccaattcctgggagatccgacttctcctccttgtgttctcctccatgttttacatggccagtatgatgggaaactctctcattttgctcactgtgacttctgaccctcacttgcactcccccatgtattttctgttagccaacctctccttcattgacctgggtgtttcctctgtcacttctcccaaaatgatttatgacctgttcagaaagcacgaagtcatctcctttggaggctgcatcgctcaaatcttcttcatccacgtcattggcggtgtggagatggtgctgctcatagccatggcctttgacagatatgtggccatatgtaagcccctccagtacctgaccattatgagcccaagaatgtgcatgttcttcttagtggctgcctgggtgaccggccttatccactctgtagttcaattggtttttgtagtaaacttgcccttctgtggtcctaatgtatcggacagcttttactgtgaccttcctcggttcatcaaacttgcctgcacagacagctaccgactggagttcatggttacagccaacagtggattcatctctctgggctccttcttcatactgatcatttcctatgtggtcatcattctcactgttctgaaacactcttcagctggtttatccaaggctctgtccaccctttcagctcacgtcagtgtggtagttttgttctttggtcctttgatttttgtctatacgtggccatctccctccacacacctggataagtttctggccatctttgatgcagttctcactcctgttttaaatcctatcatctacacattcaggaattga

SEQ ID NO: 329 - protein, 312 aa, Homo sapiens
MNGMNHSVVSEFVFMGLTNSREIQLLLFVFSLLFYFASMMGNLVIVFTVTMDAHLHSPMYFLLANLSIIDMAFCSITAPKMICDIFKKHKAISFRGCITQIFFSHALGGTEMVLLIAMAFDRYMAICKPLHYLTIMSPRMCLYFLATSSIIGLIHSLVQLVFVVDLPFCGPNIFDSFYCDLPRLLRLACTNTQELEFMVTVNSGLISVGSFVLLVISYIFILFTVWKHSSGGLAKALSTLSAHVTVVILFFGPLMFFYTWPSPTSHLDKYLAIFDAFITPFLNPVIYTFRNKDMKVAMRRLCSRLAHFTKIL

SEQ ID NO: 330 - DNA, 939 bp, Homo sapiens
atgaatggaatgaatcactctgtggtatcagaatttgtattcatgggactcaccaactcacgggagattcagcttctactttttgttttctctttgttgttctactttgcgagcatgatgggaaaccttgtcattgtattcactgtaaccatggatgctcatctgcactcccccatgtatttcctcctggctaacctctcaatcattgatatggcattttgctcaattacagcccctaagatgatttgtgatattttcaagaagcacaaggccatctcctttcggggatgtattactcagatcttctttagccatgctcttgggggcactgagatggtgctgctcatagccatggcctttgacagatacatggccatatgtaaacctctccactacctgaccatcatgagcccaagaatgtgtctatactttttagccacttcctctatcattggccttatccactcattggtccaattagtttttgtggtagatttacctttttgtggtcctaatatctttgacagtttttactgtgatctccctcggctcctcagacttgcctgtaccaacacccaagaactggagttcatggtcactgtcaatagtggactcatttctgtgggctcctttgtcttgctggtaatttcctacatcttcattctgttcactgtttggaaacattcttctggtggtctagccaaggccctctctaccctgtcagctcatgtcactgtggtcatcttgttctttgggccactgatgtttttctacacatggccttctcccacatcacacctggataaatatcttgctatttttgatgcatttattactccttttctgaatccagttatctacacattcaggaacaaagacatgaaagtggcaatgaggagactgtgcagtcgtcttgcgcattttacaaagattttgtaa

SEQ ID NO: 331 - protein, 354 aa, Homo sapiens
MTNKMYAIYIKNLNYFSFLIVQCLQPTMAIFNNTTSSSSNFLLTAFPGLECAHVWISIPVCCLYTIALLGNSMIFLVIITKRRLHKPMYYFLSMLAAVDLCLTITTLPTVLGVLWFHAREISFKACFIQMFFVHAFSLLESSVLVAMAFDRFVAICNPLNYATILTDRMVLVIGLVICIRPAVFLLPLLVAINTVSFHGGHELSHPFCYHPEVIKYTYSKPWISSFWGLFLQLYLNGTDVLFILFSYVLILRTVLGIVARKKQQKALSTCVCHICAVTIFYVPLISLSLAHRLFHSTPRVLCSTLANIYLLLPPVLNPIIYSLKTKTIRQAMFQLLQSKGSWGFNVRGLRGRWD

SEQ ID NO: 332 - DNA, 1065 bp, Homo sapiens
atgactaataaaatgtatgctatatatataaagaatcttaattatttttctttcctcatagttcagtgtcttcaaccaaccatggcaatattcaataacaccacttcgtcttcctcaaacttcctcctcactgcattccctgggctggaatgtgctcatgtctggatctccattccagtctgctgtctctacaccattgccctcttgggaaacagtatgatctttcttgtcatcattactaagcggagactccacaaacccatgtattatttcctctccatgctggcagctgttgatctatgtctgaccattacgacccttcccactgtgcttggtgttctctggtttcatgcccgggagatcagctttaaagcttgcttcattcaaatgttctttgtgcatgctttctccttgctggagtcctcggtgctggtagccatggcctttgaccgcttcgtggctatctgtaacccactgaactatgctactatcctcacagacaggatggtcctggtgatagggctggtcatctgcattagaccagcagttttcttacttccccttcttgtagccataaacactgtgtcttttcatgggggtcacgagctttcccatccattttgctaccacccagaagtgatcaaatacacatattccaaaccttggatcagcagtttttggggactgtttcttcagctctacctgaatggcactgacgtattgtttattcttttctcctatgtcctgatcctccgtactgttctgggcattgtggcccgaaagaagcaacaaaaagctctcagcacttgtgtctgtcacatctgtgcagtcactattttctatgtgccactgatcagcctctctttggcacaccgcctcttccactccaccccaagggtgctctgtagcactttggccaatatttatctgctcttaccacctgtgctgaaccctatcatttacagcttgaagaccaagacaatccgccaggctatgttccagctgctccaatccaagggttcatggggttttaatgtgaggggtcttaggggaagatgggattga

SEQ ID NO: 333 - protein, 312 aa, Homo sapiens
MSVLNNSEVKLFLLIGIPGLEHAHIWFSIPICLMYLLAIMGNCTILFIIKTEPSLHEPMYYFLAMLAVSDMGLSLSSLPTMLRVFLFNAMGISPNACFAQEFFIHGFTVMESSVLLIMSLDRFLAIHNPLRYSSILTSNRVAKMGLILAIRSILLVIPFPFTLRRLKYCQKNLLSHSYCLHQDTMKLACSDNKTNVIYGFFIALCTMLDLALIVLSYVLILKTILSIASLAERLKALNTCVSHICAVLTFYVPIITLAAMHHFAKHKSPLVVILIADMFLLVPPLMNPIVYCVKTRQIWEKILGKLLNVCGR

SEQ ID NO: 334 - DNA, 939 bp, Homo sapiens
atgtctgttctcaataactccgaagtcaagcttttccttctgattgggatcccaggactggaacatgcccacatttggttctccatccccatttgcctcatgtacctgcttgccatcatgggcaactgcaccattctctttattataaagacagagccctcgcttcatgagcccatgtattatttccttgccatgttggctgtctctgacatgggcctgtccctctcctcccttcctaccatgttgagggtcttcttgttcaatgccatgggaatttcacctaatgcctgctttgctcaagaattcttcattcatggattcactgtcatggaatcctcagtacttctaattatgtctttggaccgctttcttgccattcacaatcccttaagatacagttctatcctcactagcaacagggttgctaaaatgggacttattttagccattaggagcattctcttagtgattccatttcccttcaccttaaggagattaaaatattgtcaaaagaatcttctttctcactcatactgtcttcatcaggataccatgaagctggcctgctctgacaacaagaccaatgtcatctatggcttcttcattgctctctgtactatgctggacttggcactgattgttttgtcttatgtgctgatcttgaagactatactcagcattgcatctttggcagagaggcttaaggccctaaatacctgtgtctcccacatctgtgctgtgctcaccttctatgtgcccatcatcaccctggctgccatgcatcactttgccaagcacaaaagccctcttgttgtgatccttattgcagatatgttcttgttggtgccgccccttatgaaccccattgtgtactgtgtaaagactcgacaaatctgggagaagatcttggggaagttgcttaatgtatgtgggagataa

SEQ ID NO: 335 - protein, 314 aa, Homo sapiens
MTLGSLGNSSSSVSATFLLSGIPGLERMHIWISIPLCFMYLVSIPGNCTILFIIKTERSLHEPMYLFLSMLALIDLGLSLCTLPTVLGIFWVGAREISHDACFAQLFFIHCFSFLESSVLLSMAFDRFVAICHPLHYVSILTNTVIGRIGLVSLGRSVALIFPLPFMLKRFPYCGSPVLSHSYCLHQEVMKLACADMKANSIYGMFVIVSTVGIDSLLILFSYALILRTVLSIASRAERFKALNTCVSHICAVLLFYTPMIGLSVIHRFGKQAPHLVQVVMGFMYLLFPPVMNPIVYSVKTKQIRDRVTHAFCY

SEQ ID NO: 336 - DNA, 945 bp, Homo sapiens
atgaccctgggatccctgggaaacagcagcagcagcgtttctgctaccttcctgctgagtggcatccctgggctggagcgcatgcacatctggatctccatcccactgtgcttcatgtatctggtttccatcccgggcaactgcacaattctttttatcattaaaacagagcgctcacttcatgaacctatgtatctcttcctgtccatgctggctctgattgacctgggtctctccctttgcactctccctacagtcctgggcatcttttgggttggagcacgagaaattagccatgatgcctgctttgctcagctctttttcattcactgcttctccttcctcgagtcctctgtgctactgtctatggcctttgaccgctttgtggctatctgccaccccttgcactatgtttccattctcaccaacacagtcattggcaggattggcctggtctctctgggtcgtagtgtagcactcatttttccattaccttttatgctcaaaagattcccctattgtggctccccagttctctcacattcttattgtctccaccaagaagtgatgaaattggcctgtgccgacatgaaggccaacagcatctacggcatgtttgtcatcgtctctacagtgggtatagactcactgctcatcctcttctcttatgctctgatcctgcgcaccgtgctgtccatcgcctccagggctgagagattcaaggcccttaacacctgtgtttcccacatctgtgctgtgctgctcttctacactcccatgattggcctctctgtcatccatcgctttggaaagcaggcaccccacctggtccaggtggtcatgggtttcatgtatcttctctttcctcctgtgatgaatcccattgtctacagtgtgaagaccaaacagatccgggatcgagtgacgcatgccttttgttactaa

SEQ ID NO: 337 - protein, 302 aa, Homo sapiens
MTNLNASQANHRNFILTGIPGTPDKNPWLAFPLGFLYTLTLLGNGTILAVIKVEPSLHEPTYYFLSILALTDVSLSMSTLPSMLSIYWFNAPQIVFDACIMQMFFIHVFGIVESGVLVSMAFDRFVAIRNPLHYVSILTHDVIRKTGISVLTRAVCVVFPVPFLIKCLPFCHSNVLSHSYCLHQNMMRLACASTRINSLYGLIVVIFTLGLDVLLTLLSYVLTLKTVLGIVSRGERLKTLSTCLSHMSTVLLFYVPFMGAASMIHRFWEHLSPVVHMVMADIYLLLPPVLNPIVYSVKTKQI

SEQ ID NO: 338 - DNA, 909 bp, Homo sapiens
atgacgaacttgaatgcatcacaggccaaccaccgtaacttcattctgacaggtatcccaggaacgccagacaagaacccatggttggcctttcccctgggatttctctacacactcacactcctgggaaatggtaccatcctagctgtcatcaaggtggagccaagtctccatgagcccacgtattacttcctttctatcttggctctcactgacgttagtctctccatgtccaccttgccctccatgctcagcatctactggtttaatgcccctcagattgtttttgatgcatgcatcatgcagatgttcttcatccatgtatttggaatagtagaatcaggagtcctagtgtccatggcctttgacagatttgtggccatccgaaacccattacactatgtttccatcctcactcacgatgttattcgaaagactggaatatctgtcctcacccgggcagtctgtgtggtattccctgtgcccttccttataaagtgcctacccttctgccattccaatgtcttgtctcattcatactgtcttcaccaaaacatgatgcggctagcttgtgccagcacccgcatcaacagcctctacggcctcatcgtcgtcatcttcacactggggctcgatgttctcctcactctactgtcttatgtactcaccctgaagactgtgctgggcattgtctccagaggtgaaaggctgaaaaccctcagcacatgcctctctcacatgtctaccgtgctcctcttctatgttccttttatgggtgctgcctccatgatccacagattttgggagcatttatcaccagtagtgcacatggtcatggctgatatatacctactgctcccgcctgtgctaaaccccattgtctacagtgtgaagaccaagcaaatttga

SEQ ID NO: 339 - protein, 323 aa, Homo sapiens
MSTLPTQIAPNSSTSMAPTFLLVGMPGLSGAPSWWTLPLIAVYLLSALGNGTILWIIALQPALHRPMHFFLFLLSVSDIGLVTALMPTLLGIALAGAHTVPASACLLQMVFIHVFSVMESSVLLAMSIDRALAICRPLHYPALLTNGVISKISLAISFRCLGLHLPLPFLLAYMPYCLPQVLTHSYCLHPDVARLACPEAWGAAYSLFVVLSAMGLDPLLIFFSYGLIGKVLQGVESREDRWKAGQTCAAHLSAVLLFYIPMILLALINHPELPITQHTHTLLSYVHFLLPPLINPILYSVKMKEIRKRILNRLQPRKVGGAQ

SEQ ID NO: 340 - DNA, 972 bp, Homo sapiens
atgtcaacattaccaactcagatagcccccaatagcagcacttcaatggcccccaccttcttgctggtgggcatgccaggcctatcaggtgcaccctcctggtggacattgcccctcattgctgtctaccttctctctgcactgggaaatggcaccatcctctggatcattgccctgcagcccgccctgcaccgcccaatgcacttcttcctcttcttgcttagtgtgtctgatattggattggtcactgccctgatgcccacactgctgggcatcgcccttgctggtgctcacactgtccctgcctcagcctgccttctacagatggtttttatccatgtcttttctgtcatggagtcctctgtcttgctcgccatgtccattgatcgggcactggccatctgccgacctctccactacccagcgctcctcaccaatggtgtaattagcaaaatcagcctggccatttcttttcgatgcctgggtctccatctgcccctgccattcctgctggcctacatgccctactgcctcccacaggtcctaacccattcttattgcttgcatccagatgtggctcgtttggcctgcccagaagcttggggtgcagcctacagcctatttgtggttctttcagccatgggtttggaccccctgcttattttcttctcctatggcctgattggcaaggtgttgcaaggtgtggagtccagagaggatcgctggaaggctggtcaaacctgtgctgcccacctctctgcagtgctcctcttctatatccctatgatcctcctggcactgattaaccatcctgagctgccaatcactcagcatacccatactcttctatcctatgtccatttccttcttcctccattgataaaccctattctctatagtgtcaagatgaaggagattagaaagagaatactcaacaggttgcagcccaggaaggtgggtggtgctcagtga

SEQ ID NO: 341 - protein, 394 aa, Homo sapiens
MFYPILNDISTKNNSNIMSCCNILFIKTVEIILVYNQTQSPWYPIVPSKSLVYNNNTCFDCYHLQRVDCVPSRDHINQSMVLASGNSSSHPVSFILLGIPGLESFQLWIAFPFCATYAVAVVGNITLLHVIRIDHTLHEPMYLFLAMLAITDLVLSSSTQPKMLAIFWFHAHEIQYHACLIQVFFIHAFSSVESGVLMAMALDCYVATCFPLRHSSILTPSVVIKLGTIVMLRGLLWVSPFCFMVSRMPFCQHQAIPQSYCEHMAVLKLVCADTSISRGYGLFVAFSVAGFDMIVIGMSYVMILRAVLQLPSGEARLKAFSTRASHICVILALYIPALFSFLTYRFGHDVPRVVHILFANLYLLIPPMLNPIIYGVRTKQIGDRVIQGCCGNIP

SEQ ID NO: 342 - DNA, 1185 bp, Homo sapiens
atgttctaccccattttgaatgacataagtacgaaaaacaacagtaacatcatgtcatgttgtaacatattatttattaaaacagttgaaattattctagtttataatcaaacccaatcaccctggtatccaatagtcccatccaaaagccttgtatataataataacacttgttttgattgttatcatctgcagagagtagattgcgttcccagcagagaccatattaaccagtccatggtgctggcttcagggaacagctcttctcatcctgtgtccttcatcctgcttggaatcccaggcctggagagtttccagttgtggattgcctttccgttctgtgccacgtatgctgtggctgttgttggaaatatcactctcctccatgtaatcagaattgaccacaccctgcatgagcccatgtacctctttctggccatgctggccatcactgacctggtcctctcctcctccactcaacctaagatgttggccatattctggtttcatgctcatgagattcagtaccatgcctgcctcatccaggtgttcttcatccatgccttttcttctgtggagtctggggtgctcatggctatggccctggactgctacgtggctacctgcttcccactccgacactctagcatcctgaccccatcggtcgtgatcaaactggggaccatcgtgatgctgagagggctgctgtgggtgagccccttctgcttcatggtgtctaggatgcccttctgccaacaccaagccattccccagtcatactgtgagcacatggctgtgctgaagttggtgtgtgctgatacaagcataagtcgtgggtatgggctctttgtggccttctctgtggctggctttgatatgattgtcattggtatgtcatacgtgatgattttgagagctgtgcttcagttgccctcaggtgaagcccgcctcaaagcttttagcacacgtgcctcccatatctgtgtcatcttggctctttatatcccagcccttttttctttcctcacctaccgctttggccatgatgtgccccgagttgtacacatcctgtttgctaatctctatctactgatacctcccatgctcaaccccatcatttatggagttagaaccaaacagatcggggacagggttatccaaggatgttgtggaaacatcccctga

SEQ ID NO: 343 - protein, 311 aa, Homo sapiens
MSNASLVTAFILTGLPHAPGLDALLFGIFLVVYVLTVLGNLLILLVIRVDSHLHTPMYYFLTNLSFIDMWFSTVTVPKMLMTLVSPSGRAISFHSCVAQLYFFHFLGSTECFLYTVMSYDRYLAISYPLRYTSMMSGSRCALLATGTWLSGSLHSAVQTILTFHLPYCGPNQIQHYFCDAPPILKLACADTSANVMVIFVDIGIVASGCFVLIVLSYVSIVCSILRIRTSDGRRRAFQTCASHCIVVLCFFVPCVVIYLRPGSMDAMDGVVAIFYTVLTPLLNPVVYTLRNKEVKKAVLKLRDKVAHPQRK

SEQ ID NO: 344 - DNA, 936 bp, Homo sapiens
atgtccaacgccagcctcgtgacagcattcatcctcacaggccttccccatgccccagggctggacgccctcctctttggaatcttcctggtggtttacgtgctcactgtgctggggaacctcctcatcctgctggtgatcagggtggattctcacctccacacccccatgtactacttcctcaccaacctgtccttcattgacatgtggttctccactgtcacggtgcccaaaatgctgatgaccttggtgtccccaagcggcagggctatctccttccacagctgcgtggctcagctctattttttccacttcctggggagcaccgagtgtttcctctacacagtcatgtcctatgatcgctacttggccatcagttacccgctcaggtacaccagcatgatgagtgggagcaggtgtgccctcctggccaccggcacttggctcagtggctctctgcactctgctgtccagaccatattgactttccatttgccctactgtggacccaaccagatccagcactacttctgtgacgcaccgcccatcctgaaactggcctgtgcagacacctcagccaacgtgatggtcatctttgtggacattgggatagtggcctcaggctgctttgtcctgatagtgctgtcctatgtgtccatcgtctgttccatcctgcggatccgcacctcagatgggaggcgcagagcctttcagacctgtgcctcccactgtattgtggtcctttgcttctttgttccctgtgttgtcatttatctgaggccaggctccatggatgccatggatggagttgtggccattttctacactgtgctgacgccccttctcaaccctgttgtgtacaccctgagaaacaaggaggtgaagaaagctgtgttgaaacttagagacaaagtagcacatcctcagaggaaataa

SEQ ID NO: 345 - protein, 335 aa, Homo sapiens
MAQVRALHKIMALFSANSIGAMNNSDTRIAGCFLTGIPGLEQLHIWLSIPFCIMYIAALEGNGILICVILSQAILHEPMYIFLSMLASADVLLSTTTMPKALANLWLGYSHISFDGCLTQKFFIHFLFIHSAVLLAMAFDRYVAICSPLRYVTILTSKVIGKIVTATLSRSFIIMFPSIFLLEHLHYCQINIIAHTFCEHMGIAHLSCSDISINVWYGLAAALLSTGLDIMLITVSYIHILQAVFRLLSQDARSKALSTCGSHICVILLFYVPALFSVFAYRFGGRSIPCYVHILLASLYVVIPPMLNPVIYGVRTKPILEGAKQMFSNLAKGSK

SEQ ID NO: 346 - DNA, 1008 bp, Homo sapiens
atggcacaggtgagggcgctgcataaaatcatggcccttttttctgctaacagcataggtgctatgaacaactctgacactcgcatagcaggctgcttcctcactggcatccctgggctggagcaactacatatctggctgtccatccccttctgcatcatgtacatcgctgccctggaaggcaatggcatcctaatttgtgtcatcctctcccaggcaatcctgcatgagcccatgtacatattcttatctatgctggccagtgctgatgtcttgctctctaccaccaccatgcctaaggccctggccaatttgtggctaggttatagccacatttcctttgatggctgcctcactcaaaagttcttcattcacttcctcttcattcactctgctgtcctgctggccatggcctttgaccgctatgtggccatctgctcccccctgcgatatgtcacaatcctcacaagcaaggtcattgggaagatcgtcactgccaccctgagccgcagcttcatcattatgtttccatccatctttctccttgagcacctgcactattgccagatcaacatcattgcacacacattttgtgagcacatgggcattgcccatctgtcctgttctgatatctccatcaatgtctggtatgggttggcagctgctcttctctccacaggcctggacatcatgcttattactgtttcctacatccacatcctccaagcagtcttccgcctcctttctcaagatgcccgctccaaggccctgagtacctgtggatcccatatctgtgtcatcctactcttctatgtccctgcccttttttctgtctttgcctacaggtttggtgggagaagcatcccatgctatgtccatattctcctggccagcctctacgttgtcattcctcctatgctcaatcccgttatttatggagtgaggactaagccaatactggaaggggctaagcagatgttttcaaatcttgccaaaggatctaaataa

SEQ ID NO: 347 - protein, 428 aa, Homo sapiens
MFPSLCPCVLLVQLPLMNENMQCFVFCSCDSLLRMMVSRFIHVPFVKMKRIIVGGYSKHFFSNELLCVRPWSGKTWSIRHHIFDMELLTNNLKFITDPFVCRLRHLSPTPSEEHMKNKNNVTEFILLGLTQNPEGQKVLFVTFLLIYMVTIMGNLLIIVTIMASQSLGSPMYFFLASLSFIDTVYSTAFAPKMIVDLLSEKKTISFQGCMAQLFMDHLFAGAEVILLVVMAYDRYMAICKPLHELITMNRRVCVLMLLAAWIGGFLHSLVQFLFIYQLPFCGPNVIDNFLCDLYPLLKLACTNTYVTGLSMIANGGAICAVTFFTILLSYGVILHSLKTQSLEGKRKAFYTCASHVTVVILFFVPCIFLYARPNSTFPIDKSMTVVLTFITPMLNPLIYTLKNAEMKSAMRKLWSKKVSLAGKWLYHS

SEQ ID NO: 348 - DNA, 1287 bp, Homo sapiens
atgttcccctccctgtgtccatgtgttctccttgttcaactcccacttatgaatgagaacatgcagtgttttgttttctgttcttgtgatagtttgctgagaatgatggtttcccgcttcatccatgtcccatttgtaaaaatgaaaaggataattgtgggaggatattctaaacacttcttttctaatgagctgctctgtgtgaggccctggtcagggaaaacgtggtcgataaggcatcacatttttgacatggagcttctgacaaataatctcaaatttatcactgacccttttgtttgtaggctccgacacctgagtccaacaccttcagaagaacacatgaaaaataagaacaatgtgactgaatttatcctcttagggctcacacagaaccctgaggggcaaaaggttttatttgtcacattcttactaatctacatggtgacgataatgggcaacctgcttatcatagtgaccatcatggccagccagtccctgggttcccccatgtacttttttctggcttctttatcattcatagataccgtctattctactgcatttgctcccaaaatgattgttgacttgctctctgagaaaaagaccatttcctttcagggttgtatggctcaactttttatggatcatttatttgctggtgctgaagtcattcttctggtggtaatggcctatgatcgatacatggccatctgtaagcctcttcatgaattgatcaccatgaatcgtcgagtctgtgttcttatgctgttggcggcctggattggaggctttcttcactcattggttcaatttctctttatttatcagctccctttctgtggacccaatgtcattgacaacttcctgtgtgatttgtatcccttattgaaacttgcttgcaccaatacctatgtcactgggctttctatgatagctaatggaggagcgatttgtgctgtcaccttcttcactatcctgctttcctatggggtcatattacactctcttaagactcagagtttggaagggaaacgaaaagctttctacacctgtgcatcccacgtcactgtggtcattttattctttgtcccctgtatcttcttgtatgcaaggcccaattctacttttcccattgataaatccatgactgtagttctaacttttataactcccatgctgaacccactaatctataccctgaagaatgcagaaatgaaaagtgccatgaggaaactttggagtaaaaaagtaagcttagctgggaaatggctgtatcactcatga

SEQ ID NO: 349 - protein, 298 aa, Homo sapiens
MQQNNSVPEFILLGLTQDPLRQKIVFVIFLIFYMGTVVGNMLIIVTIKSSRTLGSPMYFFLFYLSFADSCFSTSTAPRLIVDALSEKKIITYNECMTQVFALHLFGCMEIFVLILMAVDRYVAICKPLRYPTIMSQQVCIILIVLAWIGSLIHSTAQIILALRLPFCGPYLIDHYCCDLQPLLKLACMDTYMINLLLVSNSGAICSSSFMILIISYIVILHSLRNHSAKGKKKALSACTSHIIVVILFFGPCIFIYTRPPTTFPMDKMVAVFYTIGTPFLNPLIYTSEECRSEKCHEK

SEQ ID NO: 350 - DNA, 895 bp, Homo sapiens
atgcagcaaaataacagtgtgcctgaattcatactgttaggattaacacaggatcccttgaggcagaaaatagtgtttgtaatcttcttaattttctatatgggaactgtggtggggaatatgctcattattgtgaccatcaagtccagccggacactaggaagccccatgtacttctttctattttatttgtcctttgcagattcttgcttttcaacttccacagcccctagattaattgtggatgctctctctgaaaagaaaattataacctacaatgagtgcatgacacaagtctttgcactacatttatttggctgcatggagatctttgtcctcattctcatggctgttgatcgctatgtggccatctgtaagcccttgcgttacccaaccatcatgagccagcaggtctgcatcatcctgattgttcttgcctggatagggtctttaatacactctacagctcagattatcctggccttaagattgcctttctgtggaccctatttgattgatcattattgctgtgatttgcagcccttgttgaaacttgcctgcatggacacttacatgatcaacctgctgttggtgtctaacagtggggcaatttgctcaagtagtttcatgattttgataatttcatatattgtcatcttgcattcactgagaaaccacagtgccaaagggaagaaaaaggctctctccgcttgcacgtctcacataattgtagtcatcttattctttggcccatgtatattcatatatacacgccccccgaccactttccccatggacaagatggtggcagtattttatactattggaacaccctttctcaatccactcatctacacatctgaggaatgcagaagtgaaaaatgccatgagaaag

SEQ ID NO: 351 - protein, 306 aa, Homo sapiens [sequence omitted]

SEQ ID NO: 352 - DNA, 921 bp, Homo sapiens
atgcagaggagcaatcacacagtgactgagttcatcctgctgggcttcaccacagatccagggatgcaactgggcctctttgtggtgttcctgggtgtgtactgtctgactgtggtaggaagtagcaccctcatcgtgttgatctgtaatgactcccgcctacacacacccatgtattttgtcattggaaatctgtcatttctggatctctggtattcttctgtccacaccccaaagatcctagtgacctgcatctctgaagacaaaagcatctcctttgctggctgcctgtgtcagttcttctctgccaggctggcctatagtgagtgctacctactggctgccatggcttatgaccactacgtggccatctccaagcccctgctttatgctcagaccatgccaaggagattgtgcatctgtttggttttatattcctatactgggggttttgtcaatgcaataatattaaccagcaacacattcacattggatttttgtggtgacaatgtcattgatgactttttctgtgatgttccacccctcgtgaagctggcatgcagtgtgagagagagctaccaggctgtgctgcacttccttctggcctccaatgtcatctcccctactgtgctcatccttgcctcttacctctccatcatcaccaccatcctgaggatccactctacccagggccgcatcaaagtcttctccacatgctcctcccacctgatctccgttaccttatactatggctccattctctacaactactcccggccaagttccagctactccctcaagagggacaaaatggtttctaccttttatactatgctgttccccatgttgaatcccatgatctacagtctgaggagtaaagacatgaaagacgctctgaaaaaattcttcaagtcagcataa

SEQ ID NO: 353 - protein, 311 aa, Homo sapiens
MTGGGNITEITYFILLGFSDFPRIIKVLFTIFLVIYITSLAWNLSLIVLIRMDSHLHTPMYFFLSNLSFIDVCYISSTVPKMLSNLLQEQQTITFVGCIIQYFIFSTMGLSESCLMTAMAYDRYAAICNPLLYSSIMSPTLCVWMVLGAYMTGLTASLFQIGALLQLHFCGSNVIRHFFCDMPQLLILSCTDTFFVQVMTAILTMFFGIASALVIMISYGYIGISIMKITSAKGSPKAFNTCASHLTAVSLFYTSGIFVYLRSSSGGSSSFDRFASVFYTVVIPMLNPLIYSLRNKEIKDALKRLQKRKCC

SEQ ID NO: 354 - DNA, 936 bp, Homo sapiens
atgactgggggaggaaatattacagaaatcacctatttcatcctgctgggattctcagattttcccaggatcataaaagtgctcttcactatattcctggtgatctacattacatctctggcctggaacctctccctcattgttttaataaggatggattcccacctccatacacccatgtatttcttcctcagtaacctgtccttcatagatgtctgctatatcagctccacagtccccaagatgctctccaacctcttacaggaacagcaaactatcacttttgttggttgtattattcagtactttatcttttcaacgatgggactgagtgagtcttgtctcatgacagccatggcttatgatcgttatgctgccatttgtaaccccctgctctattcatccatcatgtcacccaccctctgtgtttggatggtactgggagcctacatgactggcctcactgcttctttattccaaattggtgctttgcttcaactccacttctgtgggtctaatgtcatcagacatttcttctgtgacatgccccaactgttaatcttgtcctgtactgacactttctttgtacaggtcatgactgctatattaaccatgttctttgggatagcaagtgccctagttatcatgatatcctatggctatattggcatctccatcatgaagatcacttcagctaaaggcagtccaaaggcattcaacacctgtgcttctcatctaacagctgtttccctcttctatacatcaggaatctttgtctatttgaggtccagctctggaggttcttcaagctttgacagatttgcatctgttttctacactgtggtcattcccatgttaaatcccttgatttacagtttgaggaacaaagaaattaaagatgccttaaagaggttgcaaaagagaaagtgctgctga

SEQ ID NO: 355 - protein, 314 aa, Homo sapiens
MENNTEVTEFILVGLTDDPELQIPLFIVFLFIYLITLVGNLGMIELILLDSCLHTPMYFFLSNLSLVDFGYSSAVTPKVMVGFLTGDKFILYNACATQFFFFVAFITAESFLLASMAYDRYAALCKPLHYTTTMTTNVCACLAIGSYICGFLNASIHTGNTFRLSFCRSNVVEHFFCDAPPLLTLSCSDNYISEMVIFFVVGFNDLFSILVILISYLFIFITIMKMRSPEGRQKAFSTCASHLTAVSIFYGTGIFMYLRPNSSHFMGTDKMASVFYAIVIPMLNPLVYSLRNKEVKSAFKKTVGKAKASIGFIF

SEQ ID NO: 356 - DNA, 945 bp, Homo sapiens
atggagaacaacacagaggtgactgaattcatccttgtggggttaactgatgacccagaactgcagatcccactcttcatagtcttccttttcatctacctcatcactctggttgggaacctggggatgattgaattgattctactggactcctgtctccacacccccatgtacttcttcctcagtaacctctccctggtggactttggttattcctcagctgtcactcccaaggtgatggtggggtttctcacaggagacaaattcatattatataatgcttgtgccacacaattcttcttctttgtagcctttatcactgcagaaagtttcctcctggcatcaatggcctatgaccgctatgcagcattgtgtaaacccctgcattacaccaccaccatgacaacaaatgtatgtgcttgcctggccataggctcctacatctgtggtttcctgaatgcatccattcatactgggaacactttcaggctctccttctgtagatccaatgtagttgaacactttttctgtgatgctcctcctctcttgactctctcatgttcagacaactacatcagtgagatggttattttttttgtggtgggattcaatgacctcttttctatcctggtaatcttgatctcctacttatttatatttatcaccatcatgaagatgcgctcacctgaaggacgccagaaggccttttctacttgtgcttcccaccttactgcagtttccatcttttatgggacaggaatctttatgtacttacgacctaactccagccatttcatgggcacagacaaaatggcatctgtgttctatgccatagtcattcccatgttgaatccactggtctacagcctgaggaacaaagaggttaagagtgcctttaaaaagactgtagggaaggcaaaggcctctataggattcatattttaa

SEQ ID NO: 357 - protein, 314 aa, Homo sapiens
MENKTEVTQFILLGLTNDSELQVPLFITFPFIYIITLVGNLGIIVLIFWDSCLHNPMYFFLSNLSLVDFCYSSAVTPIVMAGFLIEDKVISYNACAAQMYIFVAFATVENYLLASMAYDRYAAVCKPLHYTTTMTTTVCARLAIGSYLCGFLNASIHTGDTFSLSFCKSNEVHHFFCDIPAVMVLSCSDRHISELVLIYVVSFNIFIALLVILISYTFIFITILKMHSASVYQKPLSTCASHFIAVGIFYGTIIFMYLQPSSSHSMDTDKMAPVFYTMVIPMLNPLVYSLRNKEVKSAFKKVVEKAKLSVGWSV

SEQ ID NO: 358 - DNA, 945 bp, Homo sapiens
atggaaaataagacagaagtaacacaattcattcttctaggactaaccaatgactcagaactgcaggttcccctctttataacgttccccttcatctatattatcactctggttggaaacctgggaattattgtattgatattctgggattcctgtctccacaatcccatgtacttttttctcagtaacttgtctctagtggacttttgctactcttcagctgtcactcccatcgtcatggctggattccttatagaagacaaggtcatctcttacaatgcatgtgctgctcaaatgtatatctttgtagcttttgccactgtggaaaattacctcttggcctcaatggcctatgaccgctatgcagcagtgtgcaaacccctacattacaccacaaccatgacaacaactgtgtgtgctcgtctggccataggctcctacctctgtggtttcctgaatgcctccatccacactggggacacatttagtctctctttctgtaagtccaatgaagtccatcactttttctgtgatattccagcagtcatggttctctcttgctctgatagacatattagcgagcttgttcttatttatgttgtgagcttcaatatctttatagctctcctggttatcttgatatcctacacattcatttttatcaccatcctaaagatgcactcagcttcagtataccagaagcctttgtccacctgtgcctctcatttcattgcagtcggcatcttctatgggactattatcttcatgtacttacaacccagctccagtcactccatggacacagacaaaatggcacctgtgttctatacaatggtcatccccatgctgaaccctctggtctatagtctgaggaacaaggaagtgaagagtgcattcaagaaagttgttgagaaggcaaaattgtctgtaggatggtcagtttaa

SEQ ID NO: 359 - protein, 314 aa, Homo sapiens
MERQNQSCVVEFILLGFSNYPELQGQLFVAFLVIYLVTLIGNAIIIVIVSLDQSLHVPMYLFLLNLSVVDLSFSAVIMPEMLVVLSTEKTTISFGGCFAQMYFILLFGGAECFLLGAMAYDRFAAICHPLNYQMIMNKGVFMKLIIFSWALGFMLGTVQTSWVSSFPFCGLNEINHISCETPAVLELACADTFLFEIYAFTGTFLIILVPFLLILLSYIRVLFAILKMPSTTGRQKAFSTCAAHLTSVTLFYGTASMTYLQPKSGYSPETKKVMSLSYSLLTPLLNLLIYSLRNSEMKRALMKLWRRRVVLHTI

SEQ ID NO: 360 - DNA, 945 bp, Homo sapiens
atggaaagacaaaatcaaagctgtgtggttgaattcatcctcttgggcttttctaactatcctgagctccaggggcagctctttgtggctttcctggttatttatctggtgaccctgataggaaatgccattattatagtcatcgtctccctagaccagagcctccacgttcccatgtacctgtttctcctgaacttatctgtggtggacctgagtttcagtgcagttattatgcctgaaatgctggtggtcctctctactgaaaaaactacaatttcttttgggggctgttttgcacagatgtatttcatccttctttttggtggggctgaatgttttcttctgggagcaatggcttatgaccgatttgctgcaatttgccatcctctcaactaccaaatgattatgaataaaggagtttttatgaaattaattatattttcatgggccttaggttttatgttaggtactgttcaaacatcatgggtatctagttttcccttttgtggccttaatgaaattaaccatatatcttgtgaaaccccagcagtgttagaacttgcatgtgcagacacgtttttgtttgaaatctatgcattcacaggcacctttttgattattttggttcctttcttgttgatactcttgtcttacattcgagttctgtttgccatcctgaagatgccatcaaccactgggagacaaaaggccttttccacctgtgccgctcacctcacatctgtgaccctattctatggcacagccagtatgacttatttacaacccaaatctggctactcaccggaaaccaagaaagtgatgtcattgtcttactcacttctgacaccactgctgaatctgcttatctacagtttgcgaaatagtgagatgaagagggctttgatgaaattatggcgaaggcgagtggttttacacacaatctga

SEQ ID NO: 361 - protein, 347 aa, Homo sapiens
MIVQLICTVCFLAVNTFHVRSSFDFLKADDMGEINQTLVSEFLLLGLSGYPKIEIVYFALILVMYLVILIGNGVLIIASIFDSHFHTPMYFFLGNLSFLDICYTSSSVPSTLVSLISKKRNISFSGCAVQMFFGFAMGSTECLLLGMMAFDRYVAICNPLRYPIILSKVAYVLMASVSWLSGGINSAVQTLLAMRLPFCGNNIINHFACEILAVLKLACADISLNIITMVISNMAFLVLPLMVIFFSYMFILYTILQMNSATGRRKAFSTCSAHLTVVIIFYGTIFFMYAKPKSQDLIGEEKLQALDKLISLFYGVVTPMLNPILYSLRNKDVKAAVKYLLNKKPIH

SEQ ID NO: 362 - DNA, 1044 bp, Homo sapiens
atgattgttcagttaatttgtactgtttgtttcttggcagtaaatacatttcatgttagatcttcttttgatttcctgaaagcagatgacatgggtgagattaaccagacacttgtgtcagaatttcttcttctgggtctttctggatacccaaagattgagattgtttactttgctctcattctagttatgtacctagtgattctaattggcaatggtgttctaatcatagccagcatctttgattctcattttcacacaccaatgtacttcttcctgggcaacctctctttcctggatatctgctatacatcctcctctgttccctcaacattggtgagcttaatctcaaagaaaagaaacatttccttctctggatgtgcagtgcagatgttctttgggtttgcaatggggtcaacagaatgtctgcttcttggcatgatggcatttgatcgttatgtggccatctgcaacccactgagataccccatcatcctgagcaaggtggcgtatgtattgatggcttctgtgtcctggctgtccggtggaataaattcagctgtgcaaacattacttgccatgagactgcctttctgtgggaataatattatcaatcatttcgcatgtgaaatattagctgtcctcaagctggcctgtgctgatatatccctcaatattatcaccatggtgatatcaaatatggccttcctggttcttccactgatggtcatttttttctcctatatgttcatcctctacaccatcttgcaaatgaattcagccacaggaagacgcaaggcattttccacgtgctcagctcacctgactgtggtgatcatattttacggtaccatcttctttatgtatgcgaaaccgaagtctcaagacctgattggggaagaaaaattgcaagcattagacaagctcatttctctgttttatggggtagtgacacccatgctgaatcctatactctatagcttgagaaataaggatgtaaaagctgctgtaaaatatttgctgaacaaaaaaccaattcactaa

SEQ ID NO: 363 - protein, 324 aa, Homo sapiens
MLESNYTMPTEFLFVGFTDYLPLRVTLFLVFLLVYTLTMVGNILLIILVNINSSLQIPMYYFLSNLSFLDISCSTAITPKMLANFLASRKSISPYGCALQMFFFASFADAECLILAAMAYDRYAAICNPLLYTTLMSRRVCVCFIVLAYFSGSTTSLVHVCLTFRLSFCGSNIVNHFFCDIPPLLALSCTDTQINQLLLFALCSFIQTSTFVVIFISYFCILITVLSIKSSGGRSKTFSTCASHLIAVTLFYGALLFMYLQPTTSYSLDTDKVVAVFYTVVFPMFNPIIYSFRNKDVKNALKKLLERIGYSNEWYLNRLRIVNI

SEQ ID NO: 364 - DNA, 975 bp, Homo sapiens
atgttggagagtaattacaccatgccaactgagttcctatttgttggattcacagattatctacctctcagagtcacactgttcttggtattccttctggtatatacattaactatggtcggaaatatactcttaataattctagttaatattaattcaagccttcaaattcccatgtattattttcttagcaacttatctttcttagacatcagctgttctacagcaatcactcctaaaatgctggcaaacttcttggcatccaggaaaagcatctctccttatgggtgtgcactacaaatgtttttcttcgcttcttttgctgatgctgagtgccttatcctggcagcaatggcttatgaccgctatgcagccatctgcaacccactgctctatactacactgatgtctaggagagtctgtgtctgcttcattgtgttggcatatttcagtggaagtacaacatcactggtccatgtgtgcctcacattcaggctgtcattttgtggctccaatatcgtcaatcattttttctgtgatatcccacctcttctggctttatcatgtacagacactcagatcaaccagcttctgctctttgctttgtgcagcttcatccagaccagcacttttgtggtaatatttatttcttacttctgcatcctcatcactgtgttgagcatcaagtcctcaggtggcagaagcaaaacattctccacttgtgcttcccacctcatagcagtcaccttattctatggagcgctcctgtttatgtacttacagcccaccactagctattccctagacactgataaggtggtggcagtgttttatactgttgtatttcccatgtttaatccaataatttatagtttcagaaacaaggatgtgaaaaatgctctcaaaaagctattagaaagaattggatattcaaatgaatggtatttaaatcgtttaagaatagtcaatatctaa

SEQ ID NO: 365 - protein, 334 aa, Homo sapiens
MCYLSQLCLSLGEHTLHMGMVRHTNESNLAGFILLGFSDYPQLQKVLFVLILILYLLTILGNTTIILVSRLEPKLHMPMYFFLSHLSFLYRCFTSSVIPQLLVNLWEPMKTIAYGGCLVHLYNSHALGSTECVLLALMSCDRYVAVCRPLHYTVLMHIHLCMALASMAWLSGIATTLVQSTLTLQLPFCGHRQVDHFICEVPVLIKLACVGTTFNEAELFVASILFLIVPVSFILVSSGYIAHAVLRIKSATRRQKAFGTCFSHLTVVTIFYGTIIFMYLQPAKSRSRDQGKFVSLFYTVVTRMLNPLIYTLRIKEVKGALKKVLAKALGVNIL

SEQ ID NO: 366 - DNA, 1005 bp, Homo sapiens
atgtgttatctttctcagctatgcctcagccttggggaacacactttacatatggggatggtgagacataccaatgagagcaacctagcaggtttcatccttttagggttttctgattatcctcagttacagaaggttctatttgtgctcatattgattctgtatttactaactattttggggaataccaccatcattctggtttctcgtctggaacccaagcttcatatgccgatgtatttcttcctttctcatctctccttcctgtaccgctgcttcaccagcagtgttattccccagctcctggtaaacctgtgggaacccatgaaaactatcgcctatggtggctgtttggttcacctttacaactcccatgccctgggatccactgagtgcgtcctcttggctctgatgtcctgtgaccgctatgtggctgtctgccgtcctctccattacactgtcttaatgcatatccatctctgcatggccttggcatctatggcatggctcagtggaatagccaccaccctggtacagtccaccctcaccctgcagctgcccttctgtgggcatcgccaagtggatcatttcatctgcgaggtccctgtgctcatcaagctggcttgtgtgggcaccacgtttaacgaggctgagctttttgtggctagtatccttttccttatagtgcctgtctcattcatcctggtctcctctggctacattgcccacgcagtgttgaggattaagtcagctaccaggagacagaaagcattcgggacctgcttctcccacctgacagtggtcaccatcttttatggaaccatcatcttcatgtatctgcagccagccaagagtagatccagggaccagggcaagtttgtttctctcttctacactgtggtaacccgcatgcttaaccctcttatttataccttgaggatcaaggaggtgaaaggggcattaaagaaagttctagcaaaggctctgggagtaaatattttatga

SEQ ID NO: 367 - protein, 309 aa, Homo sapiens
MENCTEVTKFILLGLTSVPELQIPLFILFTFIYLLTLCGNLGMMLLILMDSCLHTPMYFFLSNLSLVDFGYSSAVTPKVMAGFLRGDKVISYNACAVQMFFFVALATVENYLLASMAYDRYAAVCKPLHYTTTMTASVGACLALGSYVCGFLNASFHIGGIFSLSFCKSNLVHHFFCDVPAVMALSCSDKHTSEVILVFMSSFNIFFVLLVIFISYLFIFITILKMHSAKGHQKALSTCASHFTAVSVFYGTVIFIYLQPSSSHSMDTDKMASVFYAMIIPMLNPVVYSLRNREVQNAFKKVLRRQKFL

SEQ ID NO: 368 - DNA, 930 bp, Homo sapiens
atggagaattgtacggaagtgacaaagttcattcttctaggactaaccagtgtcccagaactacagatccccctctttatcttgttcaccttcatctacctcctcactctgtgtgggaacctggggatgatgttgctgatcctgatggactcttgtctccacacccccatgtactttttcctcagtaacctgtctctggtggactttggatactcctcagctgtcactcccaaggtcatggctgggttccttagaggagacaaggtcatctcctacaatgcatgtgctgttcagatgttcttctttgtagccttggccacggtggaaaattacttgttggcctcaatggcctatgaccgctatgcagcagtgtgcaaacccctacactacaccaccaccatgacggccagtgtaggtgcctgtctggccctaggctcatatgtctgtggcttcctaaatgcctcattccacattgggggcatattcagtctctctttctgtaaatccaatctggtacatcactttttctgtgatgttccagcagtcatggctctgtcttgctctgataaacacactagtgaggtgattctggtttttatgtcaagctttaatatcttttttgttcttctagttatctttatctcctacttgttcatattcatcaccatcttgaagatgcattcagctaagggacaccaaaaagcattgtccacctgtgcctctcacttcactgcagtctccgtcttctatgggacagtaatcttcatctacttgcagcccagctccagccactccatggacacagacaaaatggcatctgtgttctatgctatgatcatccccatgctgaaccctgtggtctacagcctgaggaacagagaagtccagaatgcattcaagaaagtgttgagaaggcaaaaatttctataa

SEQ ID NO: 369 - protein, 308 aa, Homo sapiens
MDTGNKTLPQDFLLLGFPGSQTLQLSLFMLFLVMYILTVSGNVAILMLVSTSHQLHTPMYFFLSNLSFLEIWYTTAAVPKALAILLGRSQTISFTSCLLQMYFVFSLGCTEYFLLAAMAYDRCLAICYPLHYGAIMSSLLSAQLALGSWVCGFVAIAVPTALISGLSFCGPRAINHFFCDIAPWIALACTNTQAVELVAFVIAVVVILSSCLITFVSYVYIISTILRIPSASGRSKAFSTCSSHLTVVLIWYGSTVFLHVRTSIKDALDLIKAVHVLNTVVTPVLNPFIYTLRNKEVRETLLKKWKGK

SEQ ID NO: 370 - DNA, 927 bp, Homo sapiens
atggacacaggcaacaaaactctgccccaggactttctcttactgggctttcctggttctcaaactcttcagctctctctctttatgctttttctggtgatgtacatcctcacagttagtggtaatgtggctatcttgatgttggtgagcacctcccatcagttgcatacccccatgtacttctttctgagcaacctctccttcctggagatttggtataccacagcagcagtgcccaaagcactggccatcctactggggagaagtcagaccatatcatttacaagctgtcttttgcagatgtactttgttttctcattaggctgcacagagtacttcctcctggcagccatggcttatgaccgctgtcttgccatctgctatcctttacactacggagccatcatgagtagcctgctctcagcgcagctggccctgggctcctgggtgtgtggtttcgtggccattgcagtgcccacagccctcatcagtggcctgtccttctgtggcccccgtgccatcaaccacttcttctgtgacattgcaccctggattgccctggcctgcaccaacacacaggcagtagagcttgtggcctttgtgattgctgttgtggttatcctgagttcatgcctcatcacctttgtctcctatgtgtacatcatcagcaccatcctcaggatcccctctgccagtggccggagcaaagccttctccacgtgctcctcgcatctcaccgtggtgctcatttggtatgggtccacagttttccttcacgtccgcacctctatcaaagatgccttggatctgatcaaagctgtccacgtcctgaacactgtggtgactccagttttaaaccccttcatctatacgcttcgtaataaggaagtaagagagactctgctgaagaaatggaagggaaaataa

SEQ ID NO: 371 - protein, 314 aa, Homo sapiens
MTRKNYTSLTEFVLLGLADTLELQIILFLFFLVIYTLTVLGNLGMILLIRIDSQLHTPMYFFLANLSFVDVCNSTTITPKMLADLLSEKKTISFAGCFLQMYFFISLATTECILFGLMAYDRYAAICRPLLYSLIMSRTVYLKMAAGAFAAGLLNFMVNTSHVSSLSFCDSNVIHHFFCDSPPLFKLSCSDTILKESISSILAGVNIVGTLLVILSSYSYVLFSIFSMHSGEGRHRAFSTCASHLTAIILFYATCIYTYLRPSSSYSLNQDKVASVFYTVVIPMLNPLIYSLRSKEVKKALANVISRKRTSSFL

SEQ ID NO: 372 - DNA, 945 bp, Homo sapiens
atgaccagaaaaaattatacctcactgactgagttcgtcctattgggattagcagacacgctggagctacagattatcctctttttgttttttcttgtgatttatacacttacagtactgggaaatctcgggatgatcctcttaatcaggatcgattcccagcttcacacacccatgtatttcttcctggctaacctgtcctttgtggacgtttgtaactcaactaccatcaccccaaagatgctggcagatttattatcagagaagaaaaccatctcttttgctggctgcttcctacagatgtacttctttatctccctggcgacaaccgaatgcatcctctttgggttaatggcctatgacaggtatgcggccatatgtcgcccgctgctttactccttgatcatgtccaggaccgtctacctaaaaatggcagccggggcttttgctgcagggttgctgaacttcatggtcaacacaagccatgtcagcagcttgtcattctgtgactccaatgtcatccatcacttcttctgtgacagtcccccacttttcaagctctcttgttctgacacaatcctgaaagaaagcataagttctattttggctggtgtgaatattgtggggactctgcttgtcatcctctcctcctactcctacgttctcttctccattttttctatgcattcgggggaggggaggcacagagctttctccacgtgtgcctctcacctgacagccataattctgttctatgccacctgcatctatacttacctgagacctagttccagctactccctgaatcaggacaaagtggcttctgtgttctacacagtggtgattcccatgttgaatcctctgatctacagcctcaggagtaaggaagtaaagaaggctttagcgaatgtaattagcaggaaaaggacctcttcctttctgtga

SEQ ID NO: 373 - protein, 318 aa, Homo sapiens
MEWENHTILVEFFLKGLSGHPRLELLFFVLIFIMYVVILLGNGTLILISILDPHLHTPMYFFLGNLSFLDICYTTTSIPSTLVSFLSERKTISLSGCAVQMFLGLAMGTTECVLLGMMAFDRYVAICNPLRYPIIMSKDAYVPMAAGSWIIGAVNSAVQSVFVVQLPFCRNNIINHFTCEILAVMKLACADISDNEFIMLVATTLFILTPLLLIIVSYTLIIVSIFKISSSEGRSKASSTCSAHLTVVIIFYGTILFMYMKPKSKETLNSDDLDATDKIISMFYGVMTPMMNPLIYSLRNKDVKEAVKHLLNRRFFSK

SEQ ID NO: 374 - DNA, 957 bp, Homo sapiens
atggaatgggaaaaccacaccattctggtggaattttttctgaagggactttctggtcacccaagacttgagttactcttttttgtgctcatcttcataatgtatgtggtcatccttctggggaatggtactctcattttaatcagcatcttggaccctcaccttcacacccctatgtacttctttctggggaacctctccttcttggacatctgctacaccaccacctctattccctccacgctagtgagcttcctttcagaaagaaagaccatttccctttctggctgtgcagtgcagatgttcctcggcttggccatggggacaacagagtgtgtgcttctgggcatgatggcctttgaccgctatgtggctatctgcaaccctctgagatatcccatcatcatgagtaaggatgcctatgtacccatggcagctgggtcctggatcataggagctgtcaattctgcagtacaatcagtgtttgtggtacaattgcctttctgcaggaataacatcatcaatcatttcacctgtgaaattctggctgtcatgaaactggcctgtgctgacatctcagacaatgagttcatcatgcttgtggccacaacattgttcatattgacacctttgttattaatcattgtctcttacacgttaatcattgtgagcatcttcaaaattagctcttccgaggggagaagcaaagcttcctctacctgttcagcccatctgactgtggtcataatattctatgggaccatcctcttcatgtacatgaagcccaagtctaaagagacacttaattcggatgacttggatgctaccgacaaaattatatccatgttctatggggtgatgactcccatgatgaatcctttaatctacagtcttagaaacaaggatgtgaaagaggcagtaaaacacctactgaacagaaggttctttagcaagtga

SEQ ID NO: 375 - protein, 318 aa, Homo sapiens
MEWENHTILVEFFLKGLSGHPRLELLFFVLIFIMYVVILLGNGTLILISILDPHLHTPMYFFLGNLSFLDICYTTTSIPSTLVSFLSERKTISLSGCAVQMFLSLAMGTTECVLLGVMAFDRYVAICNPLRYPIIMSKDAYVPMAAGSWIIGAVNSAVQTVFVVQLPFCRNNIINHFTCEILAVMKLACADISGNEFILLVTTTLFLLTPLLLIIVSYTLIILSIFKISSSEGRSKPSSTCSARLTVVITFCGTIFLMYMKPKSQETLNSDDLDATDKLIFIFYRVMTPMMNPLIYSLRNKDVKEAVKHLLRRKNFNK

SEQ ID NO: 376 - DNA, 957 bp, Homo sapiens
atggaatgggaaaaccacaccattctggtggaattttttctgaagggactttctggtcacccaagacttgagttactcttttttgtgctcatcttcataatgtatgtggtcatccttctggggaatggtactctcattttaatcagcatcttggaccctcaccttcacacccctatgtacttctttctggggaacctctccttcttggacatctgctacaccaccacctctattccctccacgctagtgagcttcctttcagaaagaaagaccatttccctttctggctgtgcagtgcagatgttcctcagcttggccatggggacaacagagtgtgtgcttctgggcgtgatggcctttgaccgctatgtggctatctgcaaccctctgagatatcccatcatcatgagtaaggatgcctatgtacccatggcagctgggtcctggatcataggagctgtcaattctgcagtacaaacagtgtttgtggtacaattgcctttctgcaggaataacatcatcaatcatttcacctgtgaaattctagctgtcatgaaactggcctgtgctgacatctcaggcaatgagttcatcctgcttgtgaccacaacattgttcctattgacacctttgttattaattattgtctcttacacgttaatcattttgagcatcttcaaaattagctcttcggaggggagaagcaaaccttcctctacctgctcagctcgtctgactgtggtgataacattctgtgggaccatcttcctcatgtacatgaagcccaagtctcaagagacacttaattcagatgacttggatgccactgacaaacttatattcatattctacagggtgatgactcccatgatgaatcctttaatctacagtcttagaaacaaggatgtgaaggaggcagtaaaacacctactgagaagaaaaaattttaacaagtaa

SEQ ID NO: 377 - protein, 314 aa, Homo sapiens
MKRQNQSCVVEFILLGFSNFPELQVQLFGVFLVIYVVTLMGNAIITVIISLNQSLHVPMYLFLLNLSVVEVSFSAVITPEMLVVLSTEKTMISFVGCFAQMYFILLFGGTECFLLGAMAYDRFAAICHPLNYPVIMNRGVFMKLVIFSWISGIMVATVQTTWVFSFPFCGPNEINHLFCETPPVLELVCADTFLFEIYAFTGTILIVMVPFLLILLSYIRVLFAILKMPSTTGRQKAFSTCASHLTSVTLFYGTANMTYLQPKSGYSPETKKLISLAYTLLTPLLNPLIYSLRNSEMKRTLIKLWRRKVILHTF

SEQ ID NO: 378 - DNA, 945 bp, Homo sapiens
atgaaaagacaaaatcaaagctgtgtggttgaattcatcctcctgggcttttctaactttcctgagctccaggtgcagctctttggggttttcctagttatttatgtggtgaccctgatgggaaatgccatcattacagtcatcatctccttaaaccagagcctccacgttcccatgtacctgttcctcctgaacctatctgtggtggaggtgagtttcagtgcagtcattacgcctgaaatgctggtggtgctctctactgagaaaactatgatttcttttgtgggctgttttgcacagatgtatttcatccttctttttggtgggactgaatgttttctcctgggagcgatggcttatgaccgatttgctgcaatttgccatcctctgaactacccagtgattatgaacagaggggtttttatgaaattagtaatattctcatggatctcagggatcatggtggctactgtgcagaccacttgggtatttagttttccattttgtggccccaatgaaattaatcatctcttctgtgagactcccccggtactagagcttgtgtgtgcagacaccttcttatttgaaatctatgccttcacaggcaccattttgattgttatggttcctttcttgttgatcctcttgtcttacattcgagttctgtttgccatcctgaagatgccatcaactactgggagacaaaaggccttttccacctgtgcctctcacctcacatctgtgaccctgttctatggcacagccaatatgacttatttacaacccaaatctggctactcacccgaaaccaagaaactgatctcattggcttacacgttgcttacccctctgctcaatccgctcatctatagcttacgaaacagtgagatgaagaggactttgataaaactatggcgaagaaaagtgattttacacacattctga

SEQ ID NO: 379 - protein, 309 aa, Homo sapiens
MEKKKNVTEFILIGLTQNPIMEKVTFVVFLVLYMITLSGNLLIVVTITTSQALSSPMYFFLTHLSLIDTVYSSSSAPKLIVDSFQEKKIISFNGCMAQAYAEHIFGATEIILLTVMACDCYVAICKPLNYTTIMSHSLCILLVAVAWVGGFLHATIQILFTVWLPFCGPNVIGHFMCDLYPLLKLVCIDTHTLGLFVAVNSGFICLLNFLILVVSYVIILRSLKNNSLEGRCKALSTCISHIIVVVLFFVPCIFVYLRSVTTLPIDKAVAVFYTMVVPMLNPVVYTLRNAEVKSAIRKLWRKKVTSDND

SEQ ID NO: 380 - DNA, 930 bp, Homo sapiens
atggagaagaaaaagaatgtgactgaattcattttaataggtcttacacagaaccccataatggagaaagtcacgtttgtagtatttttggttctttacatgataacactttcaggcaacctgctcattgtggttaccattaccaccagccaggctctgagctcccccatgtacttcttcctgacccacctttctttgatagacacagtttattcttcttcttcagctcctaagttgattgtggattcctttcaagagaagaaaatcatctcctttaatgggtgtatggctcaagcctatgcagaacacatttttggtgctactgagatcatcctgctgacagtgatggcctgtgactgctatgtggccatctgcaaacctctgaactacacaaccattatgagccacagcctgtgcattctcctggtggcagtggcctgggtgggaggatttcttcatgcaactattcagattctctttacagtatggctgcccttctgtggccccaatgtcataggccacttcatgtgtgacttgtacccattgttaaaacttgtttgcatagacactcatacccttggtctctttgttgctgtgaacagtgggtttatctgcttattaaacttccttatcttggtggtatcctatgtgatcatcttgagatctttaaagaacaatagcttggaggggaggtgtaaagccctctccacctgtatttctcacatcatagtagttgtcttattctttgtgccctgtatatttgtgtatctgcgctcagtgaccactctgcccattgataaagctgttgctgtattttatactatggtggtcccaatgttaaatcccgtggtctacacactcagaaatgctgaggtaaaaagtgcaataaggaagctttggagaaaaaaagtgacttcagataatgattaa

SEQ ID NO: 381 - protein, 307 aa, Homo sapiens [sequence omitted]

SEQ ID NO: 382 - DNA, 924 bp, Homo sapiens
atggaaagcgagaacagaacagtgataagagaattcatcctccttggtctgacccagtctcaagatattcagctcctggtctttgtgctagttttaatattctacttcatcatcctccctggaaattttctcattattttcaccataaagtcagaccctgggctcacagcccccctctatttctttctgggcaacttggccttcctggatgcatcctactccttcactgtggctccccggatgttggtggacttcctctctgcgaagaagataatctcctacagaggctgcatcactcagctctttttcttgcacttccttggaggaggggagggattactccttgttgtgatggcctttgaccgctacatcgccatctgccggcctctgcactatcctactgtcatgaaccctagaacctgctatgcaatgatgttggctctgtggcttgggggttttgtccactccattatccaggtggtcctcatcctccgcttgcctttttgtggcccaaaccagctggacaacttcttctgtgatgtcccacaggtcatcaagctggcctgcaccgacacatttgtggtggagcttctgatggtcttcaacagtggcctgatgacactcctgtgctttctggggcttctggcctcctatgcagtcattctttgtcgcatacgagggtcttcttctgaggcaaaaaacaaggccatgtccacgtgcatcacccatatcattgttatattcttcatgtttggacctggcatcttcatctacacgcgccccttcagggctttcccagctgacaaggtggtttctctcttccacacagtgatttttcctttgttgaatcctgtcatttatacccttcgcaaccaggaagtgaaagcttccatgaaaaaggtgtttaataagcacatagcctga

SEQ ID NO: 383 - protein, 309 aa, Homo sapiens
MANRNNVTEFILLGLTENPKMQKIIFVVFSVIYINAMIGNVLIVVTITASPSLRSPMYFFLAYLSFIDACYSSVNTPKLITDSLYENKTILFNGCMTQVFGEHFFRGVEVILLTVMAYDHYVAICKPLHYTTIMKQHVCSLLVGVSWVGGFLHATIQILFICQLPFCGPNVIDHFMCDLYTLINLACTNTHTLGLFIAANSGFICLLNCLLLLVSCVVILYSLKTHSLEARHEALSTCVSHITVVILSFIPCIFVYMRPPATLPIDKAVAVFYTMITSMLNPLIYTLRNAQMKNAIRKLCSRKAISSVK

SEQ ID NO: 384 - DNA, 930 bp, Homo sapiens
atggcgaatagaaacaatgtgacagagtttattctattggggcttacagagaatccaaaaatgcagaaaatcatatttgttgtgttttctgtcatctacatcaacgccatgataggaaatgtgctcattgtggtcaccatcactgccagcccatcactgagatcccccatgtactttttcctggcctatctctcctttattgatgcctgctattcctctgtcaatacccctaagctgatcacagattcactctatgaaaacaagactatcttattcaatggatgtatgactcaagtctttggagaacattttttcagaggtgttgaggtcatcctacttactgtaatggcctatgaccactatgtggccatctgcaagcccttgcactataccaccatcatgaagcagcatgtttgtagcctgctagtgggagtgtcatgggtaggaggctttcttcatgcaaccatacagatcctcttcatctgtcaattacctttctgtggtcctaatgtcatagatcactttatgtgtgatctctacactttgatcaatcttgcctgcactaatacccacactctaggactcttcattgctgccaacagtgggttcatatgcctgttaaactgtctcttgctcctggtctcctgcgtggtcatactgtactccttaaagacccacagcttagaggcaaggcatgaagccctctctacctgtgtctcccacatcacagttgtcatcttatcctttataccctgcatatttgtgtacatgagacctccagctactttacccattgataaagcagttgctgtattctacactatgataacttctatgttaaaccccttaatctacaccttgaggaatgctcaaatgaaaaatgccattaggaaattgtgtagtaggaaagctatttcaagtgtcaaataa

SEQ ID NO: 385 - protein, 320 aa, Homo sapiens
MERTNDSTSTEFFLVGLSAHPKLQTVFFVLILWMYLMILLGNGVLISVIIFDSHLHTPMYFFLCNLSFLDVCYTSSSVPLILASFLAVKKKVSFSGCMVQMFISFAMGATECMILGTMALDRYVAICYPLRYPVIMSKGAYVAMAAGSWVTGLVDSVVQTAFAMQLPFCANNVIKHFVCEILAILKLACADISINVISMTGSNLIVLVIPLLVISISYIFIVATILRIPSTEGKHKAFSTCSAHLTVVIIFYGTIFFMYAKPESKASVDSGNEDIIEALISLFYGVMTPMLNPLIYSLRNKDVKAAVKNILCRKNFSDGK

SEQ ID NO: 386 - DNA, 963 bp, Homo sapiens
atggaaaggaccaacgattccacgtcgacagaatttttcctggtagggctttctgcccacccaaagctccagacagttttcttcgttctaattttgtggatgtacctgatgatcctgcttggaaatggagtccttatctcagttatcatctttgattctcacctgcacacccccatgtatttcttcctctgtaatctttccttcctcgacgtttgctacacaagttcctctgtcccactaattcttgccagctttctggcagtaaagaaaaaggtttccttctctgggtgtatggtgcaaatgtttatttcttttgccatgggggccacggagtgcatgatcttaggcacgatggcactggaccgctatgtggccatctgctacccactgagataccctgtcatcatgagcaagggtgcctatgtggccatggcagctgggtcctgggtcactgggcttgtggactcagtagtgcagacagcttttgcaatgcagttaccattctgtgctaataatgtcattaaacattttgtctgtgaaattctggctatcttgaaactggcctgtgctgatatttcaatcaatgtgattagtatgacagggtcgaatctgattgttctggttattccattgttagtaatttccatctcttacatatttattgttgccactattctgaggattccttccactgaaggaaaacataaggccttctccacctgctcagcccacctgacagtggtgattatattctatggaaccatcttcttcatgtacgcaaagcctgagtctaaagcctctgttgattcaggtaatgaagacatcattgaggccctcatctcccttttctatggagtgatgactcccatgcttaatcctctcatctatagtctgcgaaacaaggatgtaaaggctgctgtcaaaaacatactgtgtaggaaaaacttttctgatggaaaatga

SEQ ID NO: 387 - protein, 319 aa, Homo sapiens
MFPANWTSVKVFFFLGFFHYPKVQVIIFAVCLLMYLITLLGNIFLISITILDSHLHTPMYLFLSNLSFLDIWYSSSALSPMLANFVSGRNTISFSGCATQMYLSLAMGSTECVLLPMMAYDRYVAICNPLRYPVIMNRRTCVQIAAGSWMTGCLTAMVEMMSVLPLSLCGNSIINHFTCEILAILKLVCVDTSLVQLIMLVISVLLLPMPMLLICISYAFILASILRISSVEGRSKAFSTCTAHLMVVVLFYGTALSMHLKPSAVDSQEIDKFMALVYAGQTPMLNPIIYSLRNKEVKVALKKLLIRNHFNTAFISILK

SEQ ID NO: 388 - DNA, 960 bp, Homo sapiens
atgttcccggcaaattggacatctgtaaaagtatttttcttcctgggattttttcactaccccaaagttcaggtcatcatatttgcggtgtgcttgctgatgtacctgatcaccttgctgggcaacatttttctgatctccatcaccattctagattcccacctgcacacccctatgtacctcttcctcagcaatctctcctttctggacatctggtactcctcttctgccctctctccaatgctggcaaactttgtttcagggagaaacactatttcattctcagggtgcgccactcagatgtacctctcccttgccatgggctccactgagtgtgtgctcctgcccatgatggcatatgaccggtatgtggccatctgcaaccccctgagataccctgtcatcatgaataggagaacctgtgtgcagattgcagctggctcctggatgacaggctgtctcactgccatggtggaaatgatgtctgtgctgccactgtctctctgtggtaatagcatcatcaatcatttcacttgtgaaattctggccatcttgaaattggtttgtgtggacacctccctggtgcagttaatcatgctggtgatcagtgtacttcttctccccatgccaatgctactcatttgtatctcttatgcatttatcctcgccagtatcctgagaatcagctcagtggaaggtcgaagtaaagccttttcaacgtgcacagcccacctgatggtggtagttttgttctatgggacggctctctccatgcacctgaagccctccgctgtagattcacaggaaatagacaaatttatggctttggtgtatgccggacaaacccccatgttgaatcctatcatctatagtctacggaacaaagaggtgaaagtggccttgaaaaaattgctgattagaaatcattttaatactgccttcatttccatcctcaaataa

SEQ ID NO: 389 - protein, 318 aa, Homo sapiens
MDKINQTFVREFILLGLSGYPKLEIIFFALILVMYVVILIGNGVLIIASILDSRLHMPMYFFLGNLSFLDICYTTSSIPSTLVSLISKKRNISFSGCAVQMFFGFAMGSTECFLLGMMAFDRYVAICNPLRYPIIMNKVVYVLLTSVSWLSGGINSTVQTSLAMRWPFCGNNIINHFLCEILAVLKLACSDISVNIVTLAVSNIAFLVLPLLVIFFSYMFILYTILRTNSATGRHKAFSTCSAHLTVVIIFYGTIFFMYAKPKSQDLLGKDNLQATEGLVSMFYGVVTPMLNPIIYSLRNKDVKAAIKYLLSRKAINQ

SEQ ID NO: 390 - DNA, 957 bp, Homo sapiens
atggacaagataaaccagacatttgtgagagaattcattcttctgggactctctggttaccccaaacttgagatcattttctttgctctgattctagttatgtacgtagtgattctaattggcaatggtgttctgatcatagcaagcatcttggattctcgtcttcacatgcccatgtacttcttcctgggcaacctctctttcctggatatctgctatacaacctcctccattccctcaacactggtgagcttaatctcaaagaaaagaaacatttccttctctggatgtgcagtgcagatgttctttgggtttgcaatggggtcaacagaatgtttcctccttggcatgatggcatttgatcgttatgtggccatctgtaaccctctgagataccccatcatcatgaacaaggtggtgtatgtactgctgacttctgtatcatggctttctggtggaatcaattcaactgtgcaaacatcacttgccatgcgatggcctttctgtgggaacaatattattaatcatttcttatgcgagatcttagctgtcctaaaattagcttgttctgatatatctgtcaatattgttaccctagcagtgtcaaatattgctttcctagttcttcctctgctcgtgatttttttctcctatatgttcatcctctacaccatcttgcgaacgaactcggccacaggaagacacaaggcattttctacatgctcagctcacctgactgtggtgatcatattttatggtaccatcttctttatgtatgcaaaacctaagtcccaggacctccttgggaaagacaacttgcaagctacagaggggcttgtttccatgttttatggggttgtgacccccatgttaaaccccataatctatagcttgagaaataaagatgtaaaagctgctataaaatatttgctgagcaggaaagctattaaccagtaa

SEQ ID NO: 391 - protein, 312 aa, Homo sapiens
MMGRRNDTNVADFILTGLSDSEEVQMALFMLFLLIYLITMLGNVGMLLIIRLDLQLHTPMYFFLTHLSFIDLSYSTVVTPKTLANLLTSNYISFTGCFAQMFCFVFLGTAECYLLSSMAYDRYAAICSPLHYTVIMPKRLCLALITGPYVIGFMDSFVNVVSMSRLHFCDSNIIHHFFCDTSPILALSCTDTDNTEMLIFIIAGSTLMVSLITISASYVSILSTILKINSTSGKQKAFSTCVSHLLGVTIFYGTMIFTYLKPRKSYSLGRDQVAPVFYTIVIPMLNPLIYSLRNREVKNALIRVMQRRQDSR

SEQ ID NO: 392 - DNA, 939 bp, Homo sapiens
atgatgggtagaaggaatgacacaaatgtggctgacttcatccttacgggactgtcagactctgaagaggtccagatggctctgtttatgctatttctcctcatatacctaattactatgctggggaatgtggggatgctattgataatccgcctggacctccagcttcacactcccatgtattttttccttactcacctgtcatttattgacctcagttactcaactgtcgtcacacctaaaaccttagcgaacttactgacttccaactatatttccttcacgggctgctttgcccagatgttctgttttgtcttcttgggtactgctgaatgttatcttctctcctcaatggcctatgatcgctatgcagcgatctgcagtcctctacactacacagttattatgcccaaaaggctctgcctcgctctcatcactgggccttatgtgattggctttatggactcctttgtcaatgtggtttccatgagcagattgcatttctgtgactcaaacataattcatcactttttctgtgacacttccccaattttagctctgtcctgcactgacacagacaacactgaaatgctgatattcattatcgctggttccaccctgatggtgtcccttatcacaatatctgcatcctatgtgtccattctctctaccatcctgaaaattaattccacttcaggaaagcagaaagctttctctacttgcgtctctcatctcttgggagtcaccatcttctatggaactatgatttttacttacttaaagccaagaaagtcttattccttgggaagagatcaagtggctcctgtgttttatactattgtgattcccatgctgaatccactcatttatagtcttagaaacagagaagtgaaaaatgctctcattagagtcatgcagagaagacaggactccaggtag

SEQ ID NO: 393 - protein, 312 aa, Homo sapiens
MMGRRNNTNVADFILMGLTLSEEIQMALFMLFLLIYLITMLGNVGMILIIRLDLQLHTPMYFFLTHLSFIDLSYSTVVTPKTLANLLTSNYISFTGCFAQMFFFAFLGTAECYLLSSMAHDRYAAICSPLHYTVIMSKRLCLALITGPYVIGFIDSFVNVVSMSRLHFYDSNVIHHFFCDTSPILALSCTDTYNTEILIFIIVGSTLMVSLFTISASYVFILFTILKINSTSGKQKAFSTCVSHLLGVTIFYSTLIFTYLKPRKSYSLGRDQVASVFYTIVIPVLNPLIYSLRNKEVKNAVIRVMQRRQDSR

SEQ ID NO: 394 - DNA, 939 bp, Homo sapiens
atgatgggtagaaggaataacacaaatgtggctgacttcatccttatgggactgacactttctgaagagatccagatggctctgtttatgctatttctcctgatatacctaattactatgctggggaatgtggggatgatattgataatccgcctggacctccagcttcacactcccatgtattttttccttactcacctgtcatttattgacctcagttactcaactgtcgtcacacctaaaaccttagcgaacttactgacttccaactatatttcctttacgggctgctttgcccagatgttcttttttgccttcttgggtactgctgaatgttaccttctctcctcaatggcccatgatcgctatgcagcgatctgcagtcctctacactacacagttattatgtccaaaaggctctgcctcgctctcatcactgggccttatgtgattggctttatagactcctttgtcaacgtggtttccatgagcagattgcatttctacgactcaaacgtaattcatcactttttctgtgacacttccccaattttagctctgtcctgcactgatacatacaacaccgaaatcctgatattcattattgttggttccaccctgatggtgtcccttttcacaatatctgcatcctatgtgttcattctctttaccatcctgaaaattaattccacttcaggaaagcagaaagctttctctacttgcgtctctcatctcttgggagtcaccatcttttatagcactctgatttttacttatttaaaaccaagaaagtcttattccttgggaagagatcaagtggcttctgttttttatactattgtgattcccgtgctgaatccactcatttatagtcttagaaacaaagaggtgaaaaatgctgtcatcagagtcatgcagagaagacaggactccaggtaa

SEQ ID NO: 395 - protein, 310 aa, Homo sapiens
MAGNNFTEVTVFILSGFANHPELQVSLFLMFLFIYLFTVLGNLGLITLIRMDSQLHTPMYFFLSNLAFIDIFYSSTVTPKALVNFQSNRRSISFVGCFVQMYFFVGLVCCECFLLGSMAYNRYIAICNPLLYSVVMSQKVSNWLGVMPYVIGFTSSLISVWVISSLAFCDSSINHFFCDTTALLALSCVDTFGTEMVSFVLAGFTLLSSLLIITVTYIIIISAILRIQSAAGRQKAFSTCASHLMAVTIFYGSLIFTYLQPDNTSSLTQAQVASVFYTIVIPMLNPLIYSLRNKDVKNALLRVIHRKLFP

SEQ ID NO: 396 - DNA, 933 bp, Homo sapiens
atggctggcaacaatttcactgaggttaccgtcttcatcctctctggatttgcaaatcaccctgaattacaagtcagtcttttcttgatgtttctcttcatttatctattcactgttttgggaaacctgggactgatcacgttaatcagaatggattctcagcttcacacccctatgtactttttcctgagcaatttagcatttattgacatattttactcctctactgtaacacctaaggcattggtgaatttccaatccaatcggagatccatctcctttgttggctgctttgttcaaatgtacttttttgttggattggtgtgttgtgagtgtttccttctgggatcaatggcctacaatcgctacatagcaatctgcaatcccttactgtattcagtagtcatgtcccaaaaagtgtccaactggctgggagtaatgccatatgtgataggcttcacaagctcgctgatatctgtctgggtgataagcagtttggcgttctgtgattccagcatcaatcattttttttgtgacaccacagctcttttagcactctcctgtgtagatacattcggcacagaaatggtgagctttgtcttagctggattcactcttcttagctctctccttatcatcacagtcacttatatcatcatcatctcagccatcctgaggatccagtcagcagcaggcaggcagaaggccttctccacctgcgcatcccacctcatggctgtaactatcttttatgggtctctgattttcacctatttgcaacctgataacacatcatcgctgacccaggcgcaggtggcatctgtattctatacgattgtcattcccatgctgaatccactcatctacagtctgaggaacaaagatgtgaaaaatgctcttctgagagtcatacatagaaaactttttccatga

SEQ ID NO: 397 - protein, 350 aa, Homo sapiens
MNSLGKLVSMILSAHVFCYSKFNCFGCTHSIPALGADPPGGMGLGNESSLMDFILLGFSDHPRLEAVLFVFVLFFYLLTLVGNFTIIIISYLDPPLHTPMYFFLSNLSLLDICFTTSLAPQTLVNLQRPKKTITYGGCVAQLYISLALGSTECILLADMALDRYIAVCKPLHYVVIMNPRLCQQLASISWLSGLASSLIHATFTLQLPLCGNHRLDHFICEVPALLKLACVDTTVNELVLFVVSVLFVVIPPALISISYGFITQAVLRIKSVEARHKAFSTCSSHLTVVIIFYGTIIYVYLQPSDSYAQDQGKFISLFYTMVTPTLNPIIYTLRNKDMKEALRKLLSGKL

SEQ ID NO: 398 - DNA, 1053 bp, Homo sapiens
atgaatagtttgggaaagttggtctccatgatcctctcagctcatgtgttctgttattctaaatttaattgttttggatgtacccattccattcctgccttaggtgcggatccccctggagggatgggattgggcaatgagagttccctaatggatttcatccttctaggcttctcagaccaccctcgtctggaggctgttctctttgtatttgtccttttcttctacctcctgacccttgtgggaaacttcaccataatcatcatctcatatctggatccccctcttcataccccaatgtacttttttctcagcaacctctctttactggacatctgcttcactactagccttgctcctcagaccttagttaacttgcaaagaccaaagaagacgatcacttacggtggttgtgtggcgcaactctatatttctctggcactgggctccactgaatgtatcctcttggctgacatggccttggatcggtacattgctgtctgcaaacccctccactatgtagtcatcatgaacccacggctttgccaacagctggcatctatctcctggctcagtggtttggctagttccctaatccatgcaacttttaccttgcaattgcctctctgtggcaaccataggctggaccattttatttgcgaagtaccagctcttctcaagttggcttgtgtggacaccactgtcaatgaattggtgctttttgttgttagtgttctgtttgttgtcattccaccagcactcatctccatctcctatggcttcataactcaagctgtgctgaggatcaaatcagtagaggcaaggcataaagccttcagcacctgctcctcccaccttacagtggtgattatattctatggcaccataatctacgtgtacctgcaacctagtgacagctatgcccaggaccaagggaagtttatctccctcttctacaccatggtgacccccactttaaatcctatcatctatactttaaggaacaaggatatgaaagaggctctgaggaaacttctctcgggaaaattgtga

SEQ ID NO: 399 - protein, 323 aa, Homo sapiens
MDKSNSSVVSEFVLLGLCSSQKLQLFYFCFFSVLYTVIVLGNLLIILTVTSDTSLHSPMYFLLGNLSFVDICQASFATPKMIADFLSAHETISFSGCIAQIFFIHLFTGGEMVLLVSMAYDRYVAICKPLYYVVIMSRRTCTVLVMISWAVSLVHTLSQLSFTVNLPFCGPNVVDSFFCDLPRVTKLACLDSYIIEILIVVNSGILSLSTFSLLVSSYIIILVTVWLKSSAAMAKAFSTLASHIAVVILFFGPCIFIYVWPFTISPLDKFLAIFYTVFTPVLNPIIYTLRNRDMKAAVRKIVNHYLRPRRISEMSLVVRTSFH

SEQ ID NO: 400 - DNA, 972 bp, Homo sapiens
atggataagtccaattcttcagtggtgtctgaatttgtactgttgggactctgtagttctcaaaaactccagcttttctatttttgtttcttctctgtgttgtatacagtcattgtgctgggaaatcttctcattatcctcacagtgacttctgataccagcctgcactcccctatgtactttctcttgggaaacctttcctttgttgacatttgtcaggcttcttttgctacccctaaaatgattgcagattttctgagtgcacacgagaccatatctttcagtggctgcatagcccaaattttctttattcacctttttactggaggggagatggtgctacttgtttcgatggcctatgacaggtatgtagccatatgcaaacccttatactatgtggtcatcatgagccgaaggacatgcactgtcttggtaatgatctcctgggctgtgagcttggtgcacacattaagccagttatcatttactgtgaacctgcctttttgtggacctaatgtagtagacagctttttttgtgatcttcctcgagtcaccaaacttgcctgcctggactcttacatcattgaaatactaattgtggtcaatagtggaattctttccctaagcactttctctctcttggtcagctcctacatcattattcttgttacagtttggctcaagtcttcagctgcaatggcaaaggcattttctacgctggcttcccatattgcagtagtaatattattctttggaccttgcatcttcatctatgtgtggccctttaccatctctcctttggataaatttcttgccatattttacactgttttcacccccgtcctaaaccccattatttatacactaaggaatagggatatgaaggctgccgtaaggaaaattgtgaaccattacctgaggccaaggagaatttctgaaatgtcactagtagtgagaacttcctttcattaa

SEQ ID NO: 401 - protein, 311 aa, Homo sapiens
MAHTNESMVSEFVLLGLSNSWGLQLFFFAIFSIVYVTSVLGNVLIIVIISFDSHLNSPMYFLLSNLSFIDICQSNFATPKMLVDFFIERKTISFEGCMAQIFVLHSFVGSEMMLLVAMAYDRFIAICKPLHYSTIMNRRLCVIFVSISWAVGVLHSVSHLAFTVDLPFCGPNEVDSFFCDLPLVIELACMDTYEMEIMTLTNSGLISLSCFLALIISYTIILIGVRCRSSSGSSKALSTLTAHITVVILFFGPCIYFYIWPFSRLPVDKFLSVFYTVCTPLLNPIIYSLRNEDVKAAMWKLRNHHVNSWKN

SEQ ID NO: 402 - DNA, 936 bp, Homo sapiens
atggctcacacaaatgaatcgatggtgtctgagtttgtacttttgggactctctaattcctggggacttcaacttttctttttcgccatcttctctatagtctatgtgacatcagtgctaggcaatgtcttaattattgtcattatttcttttgactcccatttgaactctcctatgtacttcttgctcagtaatctttctttcattgatatctgtcagtctaactttgccacccccaagatgcttgtagacttttttattgagcgcaagactatctcctttgagggttgcatggcccagatattcgttcttcacagttttgttgggagtgagatgatgttgcttgtagctatggcatatgacagatttatagccatatgtaagcctctgcactacagtacaattatgaaccggaggctctgtgtaatttttgtgtctatttcctgggcggtgggcgttcttcattctgtgagccacttggcttttacagtggacctgccattctgtggtcccaatgaggtggatagcttcttttgtgaccttcccttggtgatagagctggcttgcatggatacatatgaaatggaaattatgaccctaacgaacagtggcctgatatcattgagctgtttcctggctttaattatttcctacaccatcattttgatcggtgtccgatgcaggtcctccagtgggtcatctaaggctctttctacattaactgcccacatcacagtggtcattcttttcttcgggccttgcatttatttctatatatggccttttagcagacttcctgtggacaaatttctttctgtgttctacactgtttgtactcccttgttgaaccccatcatctactctttgaggaatgaagatgttaaagcagccatgtggaagctgagaaaccatcatgtgaactcctggaaaaactag

SEQ ID NO: 403 - protein, 314 aa, Homo sapiens
MDVGNKSTMSEFVLLGLSNSWELQMFFFMVFSLLYVATMVGNSLIVITVIVDPHLHSPMYFLLTNLSIIDMSLASFATPKMITDYLTGHKTISFDGCLTQIFFLHLFTGTEIILLMAMSFDRYIAICKPLHYASVISPQVCVALVVASWIMGVMHSMSQVIFALTLPFCGPYEVDSFFCDLPVVFQLACVDTYVLGLFMISTSGIIALSCFIVLFNSYVIVLVTVKHHSSRGSSKALSTCTAHFIVVFLFFGPCIFIYMWPLSSFLTDKILSVFYTIFTPTLNPIIYTLRNQEVKIAMRKLKNRFLNFNKAMPS

SEQ ID NO: 404 - DNA, 945 bp, Homo sapiens
atggatgtgggcaataagtctaccatgtctgaatttgttttgctggggctctctaattcctgggaactacagatgtttttctttatggtgttttcattgctttatgtggcaacaatggtgggtaacagcctcatagtcatcacagttatagtggaccctcacctacactctcctatgtatttcctgcttaccaatctttcaatcattgatatgtctcttgcttctttcgccaccccaaagatgattacagattacctaacaggtcacaaaaccatctcttttgatggctgccttacccagatattctttctccaccttttcactggaactgagatcatcttactcatggccatgtcctttgataggtatattgcaatatgcaagcccctgcactatgcttctgtcattagtccccaggtgtgtgttgctctcgtggtggcttcctggattatgggagttatgcattcaatgagtcaggtcatatttgccctcacgttaccattctgtggtccctatgaggtagacagctttttctgtgaccttcctgtggtgttccagttggcttgtgtggatacttatgttctgggcctctttatgatctcaacaagtggcataattgcgttgtcctgttttattgttttatttaattcatatgttattgtcctggttactgtgaagcatcattcttccagaggatcatctaaggccctttctacttgtacagctcatttcattgttgtcttcttgttctttgggccatgcatcttcatctacatgtggccactaagcagctttctcacagacaagattctgtctgtgttttataccatctttactcccactctgaacccaataatctatactttgaggaatcaagaagtaaagatagccatgaggaaactgaaaaataggtttctaaattttaataaggcaatgccttcatag

SEQ ID NO: 405 - protein, 325 aa, Homo sapiens [sequence omitted]

SEQ ID NO: 406 - DNA, 978 bp, Homo sapiens
atgctagagtccttccagaaatcagagcaaatggcctggagcaatcagtctgcggtaaccgaattcatactacggggtctgtccagttctttagaactccagattttctacttcctgtttttctccatagtctatgcagccactgtgctggggaaccttcttattgtggtcaccattgcatcagagccacaccttcattcccctacgtactttctgctgggcaatctctccttcattgacatgtccctggcctcatttgccacccccaaaatgattgcagacttccttagagaacacaaagccatctcttttgaaggctgcatgacccagatgttcttcctacatctcttagggggtgctgagattgtactgctgatctccatgtcctttgataggtacgtggctatctgtaagcctctacattacctaacaatcatgagccgaagaatgtgtgttgggcttgtgatactttcctggattgtcggcatcttccatgctctgagtcagttagcatttacagtgaatctgcccttctgtggacccaatgaagtagacagtttcttttgtgacctccctttggtgattaaacttgcttgtgtcgacacatatattctgggggtgttcatgatctcaaccagtggcatgattgccctggtgtgcttcatcctcttggtgatctcttacactatcatcctggtcaccgttcggcagcgttcctctggtggatcctccaaagccctctccacgtgcagtgcccactttactgttgtgacccttttctttggcccatgcactttcatttatgtgtggcctttcacaaatttcccaatagacaaagtactctcagtattttataccatatacactcccctcttgaatccagtgatctataccgttaggaataaagatgtcaagtattccatgaggaaactaagcagccatatctttaaatctaggaagactgatcatactccttaa

SEQ ID NO: 407 - protein, 313 aa, Homo sapiens [sequence omitted]

SEQ ID NO: 408 - DNA, 942 bp, Homo sapiens
atggaaactgcaaattacaccaaggtgacagaatttgttctcactggcctatcccagactcgggaggtccaactagtcctatttgttatatttctatccttctatttgttcatcctaccaggaaatatccttatcatttgcaccatcaggctagaccctcatctgacttctcctatgtatttcctgttggctaatctggccctccttgatatttggtactcttccattacagcccctaaaatgctcatagacttctttgtggagaggaagataatttcctttggtggatgcattgcacagctcttcttcttacactttgttggggcttcggagatgttcttgctcatagtgatggcctatgaccgctatgctgctatctgccgacccctccactatgctaccatcatgaatcgacgtctctgctgtatcctggtggctctctcctggatggggggcttcattcattctataatacaggtggctctcattgttcgacttcctttctgtgggcccaatgagttagacagttacttctgtgacatcacacaggttgtccggattgcctgtgccaacaccttcccagaggagttagtgatgatctgtagtagtggtctgatctctgtggtgtgtttcattgctctgttaatgtcctatgccttccttctggccttgctcaagaaacattcaggctcagatgagaataccaacagggccatgtccacctgctattcccacattaccattgtggtgctaatgtttgggccatccatctacatttatgctcgcccatttgactcattttccctagataaagtggtgtctgtgtttcatactgtaatattccctttacttaatcccattatttacacattgagaaacaaggaagtaaaggcagccatgaggaaggtggtcaccaaatatattttgtgtgaagagaagtga

SEQ ID NO: 409 - protein, 348 aa, Homo sapiens
MLTSLTDLCFSPIQVAEIKSLPKSMNETNHSRVTEFVLLGLSSSRELQPFLFLTFSLLYLAILLGNFLIILTVTSDSRLHTPMYFLLANLSFIDVCVASFATPKMIADFLVERKTISFDACLAQIFFVHLFTGSEMVLLVSMAYDRYVAICKPLHYMTVMSRRVCVVLVLISWFVGFIHTTSQLAFTVNLPFCGPNKVDSFFCDLPLVTKLACIDTYVVSLLIVADSGFLSLSSFLLLVVSYTVILVTVRNRSSASMAKARSTLTAHITVVTLFFGPCIFIYVWPFSSYSVDKVLAVFYTIFTLILNPVIYTLRNKEVKAAMSKLKSRYLKPSQVSVVIRNVLFLETK

SEQ ID NO: 410 - DNA, 1047 bp, Homo sapiens
atgctcacttcattaactgatctctgtttctctcctattcaggtagctgaaattaagtcccttccaaaatcgatgaatgagacaaatcattctcgggtgacagaatttgtgttgctgggactgtctagttcaagggagctccaacctttcttgtttcttacattttcactactttatctagcaattctgttgggcaactttctcatcatcctcactgtgacctcagattcccgccttcacacccccatgtactttctgcttgcaaacctgtcatttatagacgtatgtgttgcctcttttgctacccctaaaatgattgcagactttctggttgagcgcaagactatttcttttgatgcctgcctggcccagattttctttgttcatctcttcactggcagtgaaatggtgctcctagtttccatggcctatgaccgttatgttgctatatgcaaacctctccactacatgacagtcatgagccgtcgtgtatgtgttgtgctcgtcctcatttcatggtttgtgggcttcatccatactaccagccagttggcattcactgttaatctgccattttgtggtcctaataaggtagacagttttttctgtgaccttcctctagtgaccaagttagcctgcatagacacttatgttgtcagcttactaatagttgcagatagtggctttctttctctgagttcctttctcctcttggttgtctcctacactgtaatacttgttacagttaggaatcgctcctctgcaagcatggcgaaggcccgctccacattgactgctcacatcactgtggtcactttattctttggaccatgcattttcatctatgtgtggcccttcagcagttactcagttgacaaagtccttgctgtattctacaccatcttcacgcttattttaaaccctgtaatctacacgctaagaaacaaagaagtgaaggcagctatgtcaaaactgaagagtcggtatctgaagcctagtcaggtttctgtagtcataagaaatgttcttttcctagaaacaaagtaa

SEQ ID NO: 411 - protein, 343 aa, Homo sapiens
MKQYSVGNQHSNYRSLLFPFLCSQMTQLTASGNQTMVTEFLFSMFPHAHRGGLLFFIPLLLIYGFILTGNLIMFIVIQVGMALHTPLYFFISVLSFLEICYTTTTIPKMLSCLISEQKSISVAGCLLQMYFFHSLGITESCVLTAMAIDRYIAICNPLRYPTIMIPKLCIQLTVGSCFCGFLLVLPEIAWISTLPFCGSNQIHQIFCDFTPVLSLACTDTFLVVIVDAIHAAEIVASFLVIALSYIRIIIVILGMHSAEGHHKAFSTCAAHLAVFLLFFGSVAVMYLRFSATYSVFWDTAIAVTFVILAPFFNPIIYSLKNKDMKEAIGRLFHYQKRAGWAGK

SEQ ID NO: 412 - DNA, 1032 bp, Homo sapiens
atgaagcaatattcagtgggtaatcaacattccaattataggagtctcttgtttccttttctgtgttcacagatgacacagttgacggccagtgggaatcagacaatggtgactgagttcctcttctctatgttcccgcatgcgcacagaggtggcctcttattctttattcccttgcttctcatctacggatttatcctaactggaaacctaataatgttcattgtcatccaggtgggcatggccctgcacacccctttgtatttctttatcagtgtcctctccttcctggagatctgctataccacaaccaccatccccaagatgctgtcctgcctaatcagtgagcagaagagcatttccgtggctggctgcctcctgcagatgtactttttccactcacttggtatcacagaaagctgtgtcctgacagcaatggccattgacaggtacatagctatctgcaatccactccgttacccaaccatcatgattcccaaactttgtatccagctgacagttggatcctgcttttgtggcttcctccttgtgcttcctgagattgcatggatttccaccttgcctttctgtggctccaaccagatccaccagatattctgtgatttcacacctgtgctgagcttggcctgcacagatacattcctagtggtcattgtggatgccatccatgcagcggaaattgtagcctccttcctggtcattgctctatcctacatccggattattatagtgattctgggaatgcactcagctgaaggtcatcacaaggccttttccacctgtgctgctcaccttgctgtgttcttgctattttttggcagtgtggctgtcatgtatttgagattctcagccacctactcagtgttttgggacacagcaattgctgtcacttttgttatccttgctccctttttcaaccccatcatctatagcctgaaaaacaaggacatgaaagaggctattggaaggcttttccactatcagaagagggctggttgggctgggaaatag

SEQ ID NO: 413 - protein, 317 aa, Homo sapiens
MRNLSGGHVEEFVLVGFPTTPPLQLLLFVLFFAIYLLTLLENALIVFTIWLAPSLHRPMYFFLGHLSFLELWYINVTIPRLLAAFLTQDGRVSYVGCMTQLYFFIALACTECVLLAVMAYDRYLAICGPLLYPSLMPSSLATRLAAASWGSGFFSSMMKLLFISQLSYCGPNIINHFFCDISPLLNLTCSDKEQAELVDFLLALVMILLPLLAVVSSYTAIIAAILRIPTSRGRHKAFSTCAAHLAVVVIYYSSTLFTYARPRAMYTFNHNKIISVLYTIIVPFFNPAIYCLRNKEVKEAFRKTVMGRCHYPRDVQD

SEQ ID NO: 414 - DNA, 954 bp, Homo sapiens
atgagaaatttgagtggaggccatgtcgaggagtttgtcttggtgggtttccctaccacgcctcccctccagctgctcctctttgtccttttttttgcaatttaccttctgacattgttggagaatgcacttattgtcttcacaatatggcttgctccaagccttcatcgtcccatgtactttttccttggccatctctctttcctggagctatggtacatcaatgtcaccattcctcggctcttggcagcctttcttacccaggatggtagagtctcctacgtaggttgcatgacccaactgtacttctttattgccttagcctgtactgaatgtgtgctgttggcagttatggcctatgatcgctacctggccatctgtggacccctcctttaccctagtctcatgccttccagtctggccactcgccttgctgctgcctcttggggcagtggcttcttcagctccatgatgaagcttctttttatttcccaattgtcctactgtggacccaacattatcaaccactttttctgtgatatttccccactactcaacctcacctgctctgacaaggagcaagcagagctagtagacttccttctggccctggtgatgattctactccctctattggctgtggtttcatcatacactgccatcattgcagccatcctgaggatccctacgtccaggggacgccacaaagccttttccacttgtgccgctcatctggcagtggttgttatctactactcctccactctcttcacctatgcacggccccgggccatgtacaccttcaaccacaacaagattatctctgtgctctacactatcattgtaccattcttcaacccagccatctactgcctgaggaacaaggaggtgaaggaggccttcaggaagacagtgatgggcagatgtcactatcctagggatgttcaggactga

SEQ ID NO: 415 - protein, 313 aa, Homo sapiens [sequence omitted]

SEQ ID NO: 416 - DNA, 942 bp, Homo sapiens
atggggcagaccaacgtaacctcctggagggattttgtcttcctgggcttctccagttctggggagttgcagctccttctctttgccttgttcctctctctgtatctagtcactctgaccagcaatgtcttcattatcatagccatcaggctggatagccatctgcacacccccatgtacctcttcctttccttcctatccttctctgagacctgctacactttgggcatcatccctagaatgctctctggcctggctgggggggaccaggctatctcctatgtgggctgtgctgcccagatgttcttttctgcctcatgggcctgtactaactgcttccttctggctgccatgggctttgacagatatgtggccatctgtgctccactccactatgccagccacatgaatcctaccctctgtgcccagctggtcattacttccttcctgactggatacctctttggactgggaatgacactagttattttccacctctcattctgcagctcccatgaaatccagcactttttttgtgacacgccacctgtgctgagcctagcctgtggagatacaggcccgagtgagctgaggatctttatcctcagtcttttggtcctcttggtctccttcttcttcatcaccatctcctacgcctacatcttggcagcaatactgaggatcccctctgctgaggggcagaagaaggccttctccacttgtgcctcgcaccttacagtggtcattattcattatggctgtgcttccttcgtgtacctgaggcccaaagccagctactctcttgagagagatcagcttattgccatgacctatactgtagtgacccccctccttaatcccattgtttatagtctaaggactagggctatacagacagctctgaggaatgctttcagagggagattgctgggtaaaggatga

SEQ ID NO: 417 - protein, 316 aa, Homo sapiens
MEAANESSEGISFVLLGLTTSPGQQRPLFVLFLLLYVASLLGNGLIVAAIQASPALHAPMYFLLAHLSFADLCFASVTVPKMLANLLAHDHSISLAGCLTQMYFFFALGVTDSCLLAAMAYDCYVAIRHPLPYATRMSRAMCAALVGMAWLVSHVHSLLYILLMARLSFCASHQVPHFFCDHQPLLRLSCSDTHHIQLLIFTEGAAVVVTPFLLILASYGAIAAAVLQLPSASGRLRAVSTCGSHLAVVSLFYGTVIAVYFQATSRREAEWGRVATVMYTVVTPMLNPIIYSLWNRDVQGALRALLIGRRISASDS

SEQ ID NO: 418 - DNA, 951 bp, Homo sapiens
atggaggctgccaatgagtcttcagagggaatctcattcgttttattgggactgacaacaagtcctggacagcagcggcctctctttgtgctgttcttgctcttgtatgtggccagcctcctgggtaatggactcattgtggctgccatccaggccagtccagcccttcatgcacccatgtacttcctgctggcccacctgtcctttgctgacctctgtttcgcctccgtcactgtgcccaagatgttggccaacttgttggcccatgaccactccatctcgctggctggctgcctgacccaaatgtacttcttctttgccctgggggtaactgatagctgtcttctggcggccatggcctatgactgctacgtggccatccggcaccccctcccctatgccacgaggatgtcccgggccatgtgcgcagccctggtgggaatggcatggctggtgtcccacgtccactccctcctgtatatcctgctcatggctcgcttgtccttctgtgcttcccaccaagtgccccacttcttctgtgaccaccagcctctcttaaggctctcgtgctctgacacccaccacatccagctgctcatcttcaccgagggcgccgcagtggtggtcactcccttcctgctcatcctcgcctcctatggggccatcgcagctgccgtgctccagctgccctcagcctctgggaggctccgggctgtgtccacctgtggctcccacctggctgtggtgagcctcttctatgggacagtcattgcagtctacttccaggccacatcccgacgcgaggcagagtggggccgtgtggccactgtcatgtacactgtagtcacccccatgctgaaccccatcatctacagcctctggaatcgcgatgtacagggggcactccgagcccttctcattgggcgaaggatctcagctagtgactcctga

SEQ ID NO: 419 - protein, 311 aa, Homo sapiens
MGSFNTSFEDGFILVGFSDWPQLEPILFVFIFIFYSLTLFGNTIIIALSWLDLRLHTPMYFFLSHLSLLDLCFTTSTVPQLLINLCGVDRTITRGGCVAQLFIYLALGSTECVLLVVMAFDRYAAVCRPLHYMAIMHPHLCQTLAIASWGAGFVNSLIQTGLAMAMPLCGHRLNHFFCEMPVFLKLACADTEGTEAKMFVARVIVVAVPAALILGSYVHIAHAVLRVKSTAGRRKAFGTCGSHLLVVFLFYGSAIYTYLQSIHNYSEREGKFVALFYTIITPILNPLIYTLRNKDVKGALWKVLWRGRDSG

SEQ ID NO: 420 - DNA, 936 bp, Homo sapiens
atgggaagtttcaacaccagttttgaagatggcttcattttggtgggattctcagattggccgcaactggagcccatcctgtttgtctttatttttattttctactccctaactctctttggcaacaccatcatcatcgctctctcctggctagaccttcggctgcacacacctatgtacttctttctctctcatctgtccctcctggacctctgcttcaccaccagcaccgtgccccagctcctgatcaacctttgcggggtggaccgcaccatcacccgtggagggtgtgtggctcagctcttcatctacctagccctgggctccacagagtgtgtgctcctggtggtgatggcctttgaccgctatgctgctgtctgtcgtccactccactacatggccatcatgcacccccatctctgccagaccctggctatcgcctcctggggtgcgggtttcgtgaactctctgatccagacaggtctcgcaatggccatgcctctctgtggccatcgactgaatcacttcttctgtgagatgcctgtatttctgaagttggcttgtgcggacacagaaggaacagaggccaagatgtttgtggcccgagtcatagtcgtggctgttcctgcagcacttattctaggctcctatgtgcacattgctcatgcagtgctgagggtgaagtcaacggctgggcgcagaaaggcttttgggacttgtgggtcccacctcctagtagttttccttttttatggctcagccatctacacatatctccaatccatccacaattattctgagcgtgagggaaaatttgttgcccttttttatactataattacccccattctcaatcctctcatttatacactaagaaacaaggacgtgaagggggctctgtggaaagtactatggaggggcagggactcagggtag

SEQ ID NO: 421 - protein, 312 aa, Homo sapiens
MENYNQTSTDFILLGLFPPSIIDLFFFILIVFIFLMALIGNLSMILLIFLDTHLHTPMYFLLSQLSLIDLNYISTIVPKMASDFLHGNKSISFTGCGIQSFFFLALGGAEALLLASMAYDRYIAICFPLHYLIRMSKRVCVLMITGSWIIGSINACAHTVYVLHIPYCRSRAINHFFCDVPAMVTLACMDTWVYEGTVFLSATIFLVFPFIGISCSYGQVLFAVYHMKSAEGRKKAYLTCSTHLTVVTFYYAPFVYTYLRPRSLRSPTEDKVLAVFYTILTPMLNPIIYSLRNKEVMGALTRVSQRICSVKM

SEQ ID NO: 422 - DNA, 939 bp, Homo sapiens
atggaaaattacaatcaaacatcaactgatttcatcttattggggctgtttccaccatcaataattgaccttttcttcttcattctcattgttttcattttcctgatggctctaattggaaacctgtccatgattcttctcatcttcttggacacccatctccacacacccatgtatttcctactgagtcagctctccctcattgacctaaattacatctccaccattgttcctaagatggcatctgattttctgcatggaaacaagtctatctccttcactgggtgtgggattcagagtttcttcttcttggcattaggaggtgcagaagcactacttttggcatctatggcctatgatcgttacattgctatttgctttcctctccactatctcatccgcatgagcaaaagagtgtgtgtgctgatgataacagggtcttggatcataggctcgatcaatgcttgtgctcacactgtatatgtactccatattccttattgccgatccagggccatcaatcatttcttctgtgatgtcccagcaatggtgactctggcctgcatggacacctgggtctatgagggcacagtgtttttgagtgccaccatctttctcgtgtttcccttcattggtatttcatgttcctatggccaggttctctttgctgtctaccacatgaaatctgcagaagggaggaagaaagcctatttgacctgcagcacccacctcactgtagtaactttctactatgcaccttttgtctacacttatctacgtccaagatccctgcgatctccaacagaggacaaggttctggctgtcttctacaccatcctcaccccaatgctcaaccccatcatctatagcctgaggaacaaggaggtgatgggggccctgacacgagtgagtcagagaatctgctctgtgaaaatgtag

SEQ ID NO: 423 - protein, 327 aa, Homo sapiens
MEWRNHSGRVSEFVLLGFPAPAPLQVLLFALLLLAYVLVLTENTLIIMAIRNHSTLHKPMYFFLANMSFLEIWYVTVTIPKMLAGFVGSKQDHGQLISFEGCMTQLYFFLGLGCTECVLLAVMAYDRYMAICYPLHYPVIVSGRLCVQMAAGSWAGGFGISMVKVFLISGLSYCGPNIINHFFCDVSPLLNLSCTDMSTAELTDFILAIFILLGPLSVTGASYVAITGAVMHISSAAGRYKAFSTCASHLTVVIIFYAASIFIYARPKALSAFDTNKLVSVLYAVIVPLLNPIIYCLRNQEVKRALCCTLHLYQHQDPDPKKASRNV

SEQ ID NO: 424 - DNA, 984 bp, Homo sapiens
atggagtggcggaaccatagtgggagagtgagtgagtttgtgttgctgggcttccctgctcctgcgccactacaggtactattgtttgcccttttgctgctggcctatgtgttggtgctgactgagaacacactcatcattatggcaattaggaaccattctaccctccacaaacccatgtacttttttctagctaatatgtcctttctggagatctggtatgtcactgtcactattcccaagatgcttgctggctttgttggatccaaacaggatcatggacagctaatctcctttgagggatgcatgacacagctctactttttccttggcttgggctgcactgagtgtgtccttctcgctgttatggcctatgatcgctatatggccatctgctatcctctccactacccagtcattgtcagtggccggctgtgtgtgcagatggctgctggctcttgggctggaggttttggcatctccatggtcaaagtttttcttatttctggcctctcttactgtggccccaacatcatcaaccactttttctgtgatgtctctccattgctcaacctctcatgcactgatatgtccacagcagagcttacagatttcatcctggccatttttattcttctagggccactctctgtcactggggcctcctatgtggccattactggtgctgtgatgcacatatcttcggctgctggacgctataaggccttttccacctgtgcctctcatctcactgttgtgataatcttctatgcagccagtatcttcatctatgctcggccaaaggcactctcagcttttgacaccaacaagttggtctctgtactgtatgctgtcattgtaccattgctcaatcccatcatttactgcctgcgcaatcaagaggtcaagagagccctatgctgtactctgcacctgtaccagcaccaggatcctgaccccaagaaagctagcagaaatgtatag

SEQ ID NO: 425 - protein, 322 aa, Homo sapiens [sequence omitted]

SEQ ID NO: 426 - DNA, 969 bp, Homo sapiens
atggagccccaaaatacctccactgtgactaactttcagctgttaggattccagaaccttcttgaatggcaggccctgctctttgtcattttcctgctcatctactgcctgaccattatagggaatgttgtcatcatcaccgtggtgagccagggcctgcgactgcactcccctatgtacatgttcctccagcatctctcctttctggaggtctggtacacgtccaccactgtgccccttctcctagccaacctgctgtcctggggccaagccatctccttctctgcctgcatggcacagctctacttcttcgtattcctcggcgccaccgagtgctttctcctggccttcatggcctatgaccgttacctggccatctgcagcccactccgctacccctttctcatgcatcgtgggctatgtgccaggttggtggtggtctcatggtgcacaggggtcagcacaggctttctgcattccatgatgatttccaggttggacttctgtgggcgcaatcagattaaccatttcttctgcgacctcccgccactcatgcagctctcctgttccagagtttatatcaccgaggtgaccatcttcatcctgtcaattgccgtgctgtgcatttgtttttttctgacactggggccctatgttttcattgtgtcctccatattgagaatcccttccacctctggccggagaaagaccttttccacatgtggctcccacctggctgttgtcactctctactacgggaccatgatctccatgtatgtgtgtcccagtccccacctgttgcctgaaatcaacaagatcatttctgtcttctacactgtggtcacaccactgctgaacccagttatctacagcttgaggaacaaagacttcaaagaagctgttagaaaggtcatgagaaggaaatgtggtattctatggagtacaagtaaaaggaagttcctttattag

SEQ ID NO: 427 - protein, 338 aa, Homo sapiens
MFYVNQIPFQLYHISFVYPTELWSRAIIPCMPTLSFWVCSATPVSPGFFALILLVFVTSIASNVVKIILIHIDSRLHTPMYFLLSQLSLRDILYISTIVPKMLVDQVMSQRAISFAGCTAQHFLYLTLAGAEFFLLGLMSCDRYVAICNPLHYPDLMSRKICWLIVAAAWLGGSIDGFLLTPVTMQFPFCASREINHFFCEVPALLKLSCTDTSAYETAMYVCCIMMLLIPFSVISGSYTRILITVYRMSEAEGRRKAVATCSSHMVVVSLFYGAAMYTYVLPHSYHTPEQDKAVSAFYTILTPMLNPLIYSLRNKDVTGALQKVVGRCVSSGKVTTF

SEQ ID NO: 428 - DNA, 1017 bp, Homo sapiens
atgttttatgtaaatcagatacctttccaactttatcatatctctttcgtgtaccctacagagctatggagcagagcaattattccgtgtatgccgactttatccttctgggtttgttcagcaacgcccgtttcccctggcttctttgccctcattctcctggtctttgtgacctccatagccagcaacgtggtcaagatcattctcatccacatagactcccgcctccacacccccatgtacttcctgctcagccagctctccctcagggacatcctgtatatttccaccattgtgcccaaaatgctggtcgaccaggtgatgagccagagagccatttcctttgctggatgcactgcccaacacttcctctacttgaccttagcaggggctgagttcttcctcctaggactcatgtcctgtgatcgctacgtagccatctgcaaccctctgcactatcctgacctcatgagccgcaagatctgctggttgattgtggcggcagcctggctgggagggtctatcgatggtttcttgctcacccccgtcaccatgcagttccccttctgtgcctctcgggagatcaaccacttcttctgcgaggtgcctgcccttctgaagctctcctgcacggacacatcagcctacgagacagccatgtatgtctgctgtattatgatgctcctcatccctttctctgtgatctcgggctcttacacaagaattctcattactgtttataggatgagcgaggcagaggggaggcgaaaggctgtggccacctgctcctcacacatggtggttgtcagcctcttctatggggctgccatgtacacatacgtgctgcctcattcttaccacacccctgagcaggacaaagctgtatctgccttctacaccatcctcactcccatgctcaatccactcatttacagccttaggaacaaggatgtcacgggggccctacagaaggttgttgggaggtgtgtgtcctcaggaaaggtaaccactttctaa

SEQ ID NO: 429 - protein, 324 aa, Homo sapiens
MGMEGLLQNSTNFVLTGLITHPAFPGLLFAIVFSIFVVAITANLVMILLIHMDSRLHTPMYFLLSQLSIMDTIYICITVPKMLQDLLSKDKTISFLGCAVQIFLYLTLIGGEFFLLGLMAYDRYVAVCNPLRYPLLMNRRVCLFMVVGSWVGGSLDGFMLTPVTMSFPFCRSREINHFFCEIPAVLKLSCTDTSLYETLMYACCVLMLLIPLSVISVSYTHILLTVHRMNSAEGRRKAFATCSSHIMVVSVFYGAAFYTNVLPHSYHTPEKDKVVSAFYTILTPMLNPLIYSLRNKDVAAALRKVLGRCGSSQSIRVATVIRKG

SEQ ID NO: 430 - DNA, 975 bp, Homo sapiens
atgggcatggagggtcttctccagaactccactaacttcgtcctcacaggcctcatcacccatcctgccttccccgggcttctctttgcaatagtcttctccatctttgtggtggctataacagccaacttggtcatgattctgctcatccacatggactcccgcctccacacacccatgtacttcttgctcagccagctctccatcatggataccatctacatctgtatcactgtccccaagatgctccaggacctcctgtccaaggacaagaccatttccttcctgggctgtgcagttcagatcttcctctacctgaccctgattggaggggaattcttcctgctgggtctcatggcctatgaccgctatgtggctgtgtgcaaccctctacggtaccctctcctcatgaaccgcagggtttgcttattcatggtggtcggctcctgggttggtggttccttggatgggttcatgctgactcctgtcactatgagtttccccttctgtagatcccgagagatcaatcactttttctgtgagatcccagccgtgctgaagttgtcttgcacagacacgtcactctatgagaccctgatgtatgcctgctgcgtgctgatgctgcttatccctctatctgtcatctctgtctcctacacgcacatcctcctgactgtccacaggatgaactctgctgagggccggcgcaaagcctttgctacgtgttcctcccacattatggtggtgagcgttttctacggggcagccttctacaccaacgtgctgccccactcctaccacactccagagaaagataaagtggtgtctgccttctacaccatcctcacccccatgctcaacccactcatctacagcttgaggaataaagatgtggctgcagctctgaggaaagtactagggagatgtggttcctcccagagcatcagggtggcgactgtgatcaggaagggctag

SEQ ID NO: 431 - protein, 304 aa, Homo sapiens
MERANHSVVSEFILLGLSKSQNLQILFFLGFSVVFVGIVLGNLLILVTVTFDSLLHTPMYFLLSNLSCIDMILASFATPKMIVDFLRERKTISWWGCYSQMFFMHLLGGSEMMLLVAMAIDRYVAICKPLHYMTIMSPRVLTGLLLSSYAVGFVHSSSQMAFMLTLPFCGPNVIDSFFCDLPLVIKLACKDTYILQLLVIADSGLLSLVCFLLLLVSYGVIIFSVRYRAASRSSKAFSTLSAHITVVTLFFAPCVFIYVWPFSRYSVDKILSVFYTIFTPLLNPIIYTLRNQEVKAAIKKRLCI

SEQ ID NO: 432 - DNA, 915 bp, Homo sapiens
atggaaagagcaaaccattcagtggtatcggaatttattttgttgggactttccaaatctcaaaatcttcagattttattcttcttgggattctctgtggtcttcgtggggattgtgttaggaaacctgctcatcttggtgactgtgacctttgattcgctccttcacacaccaatgtattttctgcttagcaacctctcctgcattgatatgatcctggcttcttttgctacccctaagatgattgtagatttcctccgagaacgtaagaccatctcatggtggggatgttattcccagatgttctttatgcacctcctgggtgggagtgagatgatgttgcttgtagccatggcaatagacaggtatgttgccatatgcaaacccctccattacatgaccatcatgagcccacgggtgctcactgggctactgttatcctcctatgcagttggatttgtgcactcatctagtcaaatggctttcatgttgactttgcccttctgtggtcccaatgttatagacagctttttctgtgaccttccccttgtgattaaacttgcctgcaaggacacctacatcctacagctcctggtcattgctgacagtgggctcctgtcactggtctgcttcctcctcttgcttgtctcctatggagtcataatattctcagttaggtaccgtgctgctagtcgatcctctaaggctttctccactctctcagctcacatcacagttgtgactctgttctttgctccgtgtgtctttatctacgtctggcccttcagcagatactcggtagataaaattctttctgtgttttacacaattttcacacctctcttaaatcctattatttatacattaagaaatcaagaggtaaaagcagccattaaaaaaagactctgcatataa

SEQ ID NO: 433 - protein, 348 aa, Homo sapiens
MDNITWMASHTGWSDFILMGLFRQSKHPMANITWMANHTGWSDFILLGLFRQSKHPALLCVVIFVVFLMALSGNAVLILLIHCDAHLHTPMYFFISQLSLMDMAYISVTVPKMLLDQVMGVNKISAPECGMQMFFYVTLAGSEFFLLATMAYDRYVAICHPLRYPVLMNHRVCLFLSSGCWFLGSVDGFTFTPITMTFPFRGSREIHHFFCEVPAVLNLSCSDTSLYEIFMYLCCVLMLLIPVVIISSSYLLILLTIHGMNSAEGRKKAFATCSSHLTVVILFYGAAIYTYMLPSSYHTPEKDMMVSVFYTILTPVVNPLIYSLRNKDVMGALKKMLTVEPAFQKAME

SEQ ID NO: 434 - DNA, 1047 bp, Homo sapiens
atggacaacatcacctggatggccagccacactggatggtcggatttcatcctgatgggactcttcagacaatccaaacatccaatggccaatatcacctggatggccaaccacactggatggtcggatttcatcctgttgggactcttcagacaatccaaacatccagcactactttgtgtggtcatttttgtggttttcctgatggcgttgtctggaaatgctgtcctgatccttctgatacactgtgacgcccacctccacacccccatgtactttttcatcagtcaattgtctctcatggacatggcgtacatttctgtcactgtgcccaagatgctcctggaccaggtcatgggtgtgaataagatctcagcccctgagtgtgggatgcagatgttcttctacgtgacactagcaggttcagaatttttccttctagccaccatggcctatgaccgctacgtggccatctgccatcctctccgttaccctgtcctcatgaaccatagggtgtgtctcttcctgtcatcaggctgctggttcctgggctcagtggatggcttcacattcactcccatcaccatgaccttccccttccgtggatcccgggagattcatcatttcttctgtgaagttcctgctgtattgaatctctcctgctcagacacctcactctatgagattttcatgtacttgtgctgtgtcctcatgctcctcatccctgtggtgatcatttcaagctcctatttactcatcctcctcaccatccacgggatgaactcagcagagggccggaaaaaggcctttgccacctgctcctcccacctgactgtggtcatcctcttctatggggctgccatctacacctacatgctccccagctcctaccacacccctgagaaggacatgatggtatctgtcttctataccatcctcactccagtggtgaaccctttaatctatagtcttaggaataaggatgtcatgggggctctgaagaaaatgttaacagtggaacctgcctttcaaaaagctatggagtag

SEQ ID NO: 435 - protein, 315 aa, Homo sapiens
MANITRMANHTGKLDFILMGLFRRSKHPALLSVVIFVVFLKALSGNAVLILLIHCDAHLHSPMYFFISQLSLMDMAYISVTVPKMLLDQVMGVNKVSAPECGMQMFLYLTLAGSEFFLLATMAYDRYVAICHPLRYPVLMNHRVCLFLASGCWFLGSVDGFMLTPITMSFPFCRSWEIHHFFCEVPAVTILSCSDTSLYETLMYLCCVLMLLIPVTIISSSYLLILLTVHRMNSAEGRKKAFATCSSHLTVVILFYGAAVYTYMLPSSYHTPEKDMMVSVFYTILTPVLNPLIYSLRNKDVMGALKKMLTVRFVL

SEQ ID NO: 436 - DNA, 948 bp, Homo sapiens
atggccaacatcaccaggatggccaaccacactggaaagttggatttcatcctcatgggactcttcagacgatccaaacatccagctctacttagtgtggtcatctttgtggttttcctgaaggcgttgtctggaaatgctgtcctgatccttctgatacactgtgacgcccacctccacagccccatgtactttttcatcagtcaattgtctctcatggacatggcgtacatttctgtcactgtgcccaagatgctcctggaccaggtcatgggtgtgaataaggtctcagcccctgagtgtgggatgcagatgttcctctatctgacactagcaggttcggaatttttccttctagccaccatggcctatgaccgctacgtggccatctgccatcctctccgttaccctgtcctcatgaaccatagggtctgtcttttcctggcatcgggctgctggttcctgggctcagtggatggcttcatgctcactcccatcaccatgagcttccccttctgcagatcctgggagattcatcatttcttctgtgaagtccctgctgtaacgatcctgtcctgctcagacacctcactctatgagaccctcatgtacctatgctgtgtcctcatgctcctcatccctgtgacgatcatttcaagctcctatttactcatcctcctcaccgtccacaggatgaactcagcagagggccggaaaaaggcctttgccacctgctcctcccacctgactgtggtcatcctcttctatggggctgccgtctacacctacatgctccccagctcctaccacacccctgagaaggacatgatggtatctgtcttctataccatcctcactccggtgctgaaccctttaatctatagtcttaggaataaggatgtcatgggggctctgaagaaaatgttaactgtgagattcgtcctttag

SEQ ID NO: 437 - protein, 312 aa, Homo sapiens
MPNSTTVMEFLLMRFSDVWTLQILHSASFFMLYLVTLMGNILIVTVTTCDSSLHMPMYFFLRNLSILDACYISVTVPTSCVNSLLDSTTISKAGCVAQVFLVVFFVYVELLFLTIMAHDRYVAVCQPLHYPVIVNSRICIQMTLASLLSGLVYAGMHTGSTFQLPFCRSNVIHQFFCDIPSLLKLSCSDTFSNEVMIVVSALGVGGGCFIFIIRSYIHIFSTVLGFPRGADRTKAFSTCIPHILVVSVFLSSCSSVYLRPPAIPAATQDLILSGFYSIMPPLFNPIIYSLRNKQIKVAIKKIMKRIFYSENV

SEQ ID NO: 438 - DNA, 939 bp, Homo sapiens
atgcccaattcaaccaccgtgatggaatttctcctcatgaggttttctgatgtgtggacactacagattttacattctgcatccttctttatgttgtatttggtaactctaatgggaaacatcctcattgtgaccgtcaccacctgtgacagcagccttcacatgcccatgtacttcttcctcaggaatctgtctatcttggatgcctgctacatttctgttacagtccctacctcatgtgtcaattccctactggacagcaccaccatttctaaggcgggatgtgtagctcaggtcttcctcgtggttttttttgtatatgtggagcttctgtttctcaccattatggctcatgaccgctatgtggctgtctgccagccacttcactaccctgtgatcgtgaactctcgaatctgcatccagatgacactggcctccctactcagtggtcttgtctatgcaggcatgcacactggcagcacattccagctgcccttctgtcggtccaacgttattcatcaattcttctgtgacatcccctctctgctgaagctctcttgctctgacaccttcagcaatgaggtcatgattgttgtctctgctctgggggtaggtggcggctgtttcatctttatcatcaggtcttacattcacatcttttcgaccgtgctcgggtttccaagaggagcagacagaacaaaggccttttccacctgcatccctcacatcctggtggtgtcagtcttcctcagttcatgctcttctgtgtacctcaggccacctgcgatacctgcagccacccaggatctgatcctttctggtttttattccataatgcctcccctctttaaccctattatttacagtcttagaaataagcaaataaaggtggccatcaagaaaatcatgaagagaattttttattcagaaaatgtgtaa

SEQ ID NO: 439 - protein, 312 aa, Homo sapiens
MDGVNDSSLQGFVLMGISDHPQLEMIFFIAILFSYLLTLLGNSTIILLSRLEARLHTPMYFFLSNLSSLDLAFATSSVPQMLINLWGPGKTISYGGCITQLYVFLWLGATECILLVVMAFDRYVAVCRPLRYTAIMNPQLCWLLAVIACLGGLGNSVIQSTFTLQLPLCGHRRVEGFLCEVPAMIKLACGDTSLNQAVLNGVCTFFTAVPLSIIVISYCLIAQAVLKIRSAEGRRKAFNTCLSHLLVVFLFYGSASYGYLLPAKNSKQDQGKFISLFYSLVTPMVNPLIYTLRNMEVKGALRRLLGKGREVG

SEQ ID NO: 440 - DNA, 939 bp, Homo sapiens
atggacggggtgaatgatagctccttgcagggctttgttctgatgggcatatcagaccatccccagctggagatgatcttttttatagccatcctcttctcctatttgctgaccctacttgggaactcaaccatcatcttgctttcccgcctggaggcccggctccatacacccatgtacttcttcctcagcaacctctcctccttggaccttgctttcgctactagttcagtcccccaaatgctgatcaatttatggggaccaggcaagaccatcagctatggtggctgcataacccagctctatgtcttcctttggctgggggccaccgagtgcatcctgctggtggtgatggcatttgaccgctacgtggcagtgtgccggcccctccgctacaccgccatcatgaacccccagctctgctggctgctggctgtgattgcctgcctgggtggcttgggcaactctgtgatccagtcaacattcactctgcagctcccattgtgtgggcaccggagggtggagggattcctctgcgaggtgcctgccatgatcaaactggcctgtggcgacacaagtctcaaccaggctgtgctcaatggtgtctgcaccttcttcactgcagtcccactaagcatcatcgtgatctcctactgcctcattgctcaggcagtgctgaaaatccgctctgcagaggggaggcgaaaggcgttcaatacgtgcctctcccatctgctggtggtgttcctcttctatggctcagccagctatgggtatctgcttccggccaagaacagcaaacaggaccagggcaagttcatttccctgttctactcgttggtcacacccatggtgaatcccctcatctacacgctgcggaacatggaagtgaagggcgcactgaggaggttgctggggaaaggaagagaagttggctga

SEQ ID NO: 441 - protein, 352 aa, Homo sapiens [sequence omitted]

SEQ ID NO: 442 - DNA, 1059 bp, Homo sapiens
atgacatctcaggaaagggatacagctatttattccattaatgtcagttttgttgcaaaggggatgactagccgctctgtgtgtgagaagatgaccatgacaacggagaaccccaaccagactgtggtgagccacttcttcctggagggtttgaggtacaccgctaaacattctagcctcttcttcctcctcttcctcctcatctacagcatcactgtggctgggaatctcctcatcctcctaactgtgggctctgactctcacctcagcttacccatgtaccacttcctggggcacctctccttcctggatgcctgtttgtctacagtgacagtgcccaaggtcatggcaggcctgctgactctggatgggaaggtgatctcctttgagggctgtgccgtacagctttattgcttccactttctggccagcactgagtgcttcctgtacacagtcatggcctatgaccgctatctggctatctgtcaacccctgcactacccagtggccatgaacagaaggatgtgtgcagaaatggctggaatcacctgggccataggtgccacgcacgctgcaatccacacctccctcaccttccgcctgctctactgtgggccttgccacattgcctacttcttctgcgacataccccctgtcctaaagctcgcctgtacagacaccaccattaatgagctagtcatgcttgccagcattggcatcgtggctgcaggctgcctcatcctcatcgttatttcctacatcttcatcgtggcagctgtgttgcgcatccgcacagcccagggccggcagcgggccttctccccctgcactgcccagctcactggggtgctcctgtactacgtgccacctgtctgtatctacctgcagcctcgctccagtgaggcaggagctggggcccctgctgtcttctacacaatcgtaactccaatgctcaacccattcatttacactttgcggaacaaggaggtgaagcatgctctgcaaaggcttttgtgcagcagcttccgagagtctacagcaggcagcccacccccatag

SEQ ID NO: 443 - protein, 314 aa, Homo sapiens [sequence omitted]

SEQ ID NO: 444 - DNA, 945 bp, Homo sapiens
atggatcagagaaattacaccagagtgaaagaatttaccttcctgggaattactcagtcccgagaactgagccaggtcttatttaccttcctgtttttggtgtacatgacaactctaatgggaaacttcctcatcatggttacagttacctgtgaatctcaccttcatacgcccatgtacttcctgctccgcaacctgtctattcttgacatctgcttttcctccatcacagctcctaaggtcctgatagatcttctatcagagacaaaaaccatctccttcagtggctgtgtcactcaaatgttcttcttccaccttctggggggagcagacgttttttctctctctgtgatggcgtttgaccgctatatagccatctccaagcccctgcactatatgaccatcatgagtagggggcgatgcacaggcctcatcgtgggcttcctgggtggggggcttgtccactccatagcgcagatttctctattgctcccactccctgtctgtggacccaatgttcttgacactttctactgcgatgtcccccaggtcctcaaacttgcctgcactgacaccttcactctggagctcctgatgatttcaaataatgggttagtcagttggtttgtattcttctttctcctcatatcttacacggtcatcttgatgatgctgaggtctcacactggggaaggcaggaggaaagccatctccacctgcacctcccacatcaccgtggtgaccctgcatttcgtgccctgcatctatgtctatgcccggcccttcactgccctccccacagacactgccatctctgtcaccttcactgtcatctcccctttgctcaatcctataatttacacgctgaggaatcaggaaatgaagttggccatgaggaaactgaagagacggctaggacaatcagaaaggattttaattcaataa

SEQ ID NO: 445 - protein, 315 aa, Homo sapiens [sequence omitted]

SEQ ID NO: 446 - DNA, 948 bp, Homo sapiens
atggctcctgaaaatttcaccagggtcactgagtttattctcacaggtgtctctagctgtccagagctccagattcccctcttcctggtcttcctagtgctctatgtgctgaccatggcagggaacctgggcatcatcaccctcaccagtgttgactctcgacttcaaacccccatgtactttttcctgagacatctagctatcatcaatcttggcaactctactgtcattgcccctaaaatgctgatgaactttttagtaaagaagaaaactacctcattctatgaatgtgccacccaactgggagggttcttgttctttattgtatcggaggtaatgatgctggctgtgatggcctatgaccgctatgtggccatttgtaaccctctgctctacatggtggtggtgtctcggcggctctgcctcctgctggtgtccctcacgtacctctatggcttttctacagctattgtggtttcaccttgtatattctctgtgtcttattgctcttctaatataatcaatcatttttactgtgatattgcacctctgttagcattatcttgctctgatacttacataccagaaacaatagtctttatatctgcagcaacaaatttgtttttttccatgattacagttctagtatcttatttcaatattgttttgtccattctaaggatacgttcaccagaaggaaggaaaaaagccttttccacctgcgcttcgcatatgatagcagtcacggttttctatgggacaatgctatttatgtatttgcagccccaaaccaaccactcactggatactgataagatggcttctgtgttttacacattggtgattcctatgctgaatcccttgatctacagcctgaggaataatgatgtaaatgttgccttaaagaaattcatggaaaatccatgttactcctttaaatcaatgtaa

SEQ ID NO: 447 - protein, 310 aa, Homo sapiens
MDPQNYSLVSEFVLHGLCTSRHLQNFFFIFFFGVYVAIMLGNLLILVTVISDPCLHSSPMYFLLGNLAFLDMWLASFATPKMIRDFLSDQKLISFGGCMAQIFFLHFTGGAEMVLLVSMAYDRYVAICKPLHYMTLMSWQTCIRLVLASWVVGFVHSISQVAFTVNLPYCGPNEVDSFFCDLPLVIKLACMDTYVLGIIMISDSGLLSLSCFLLLLISYTVILLAIRQRAAGSTSKALSTCSAHIMVVTLFFGPCIFVYVRPFSRFSVDKLLSVFYTIFTPLLNPIIYTLRNEEMKAAMKKLQNRRVTFQ

SEQ ID NO: 448 - DNA, 933 bp, Homo sapiens
atggacccacagaactattccttggtgtcagaatttgtgttgcatggactctgcacttcacgacatcttcaaaattttttctttatatttttctttggggtctatgtggccattatgctgggtaaccttctcattttggtcactgtaatttctgatccctgcctgcactcctcccctatgtacttcctgctggggaacctagctttcctggacatgtggctggcctcatttgccactcccaagatgatcagggatttccttagtgatcaaaaactcatctcctttggaggatgtatggctcaaatcttcttcttgcactttactggtggggctgagatggtgctcctggtttccatggcctatgacagatatgtggccatatgcaaacccttgcattacatgactttgatgagttggcagacttgcatcaggctggtgctggcttcatgggtcgttggatttgtgcactccatcagtcaagtggctttcactgtaaatttgccttactgtggccccaatgaggtagacagcttcttctgtgacctccctctggtgatcaaacttgcctgcatggacacctatgtcttgggtataattatgatctcagacagtgggttgctttccttgagctgttttctgctcctcctgatctcctacaccgtgatcctcctcgctatcagacagcgtgctgccggtagcacatccaaagcactctccacttgctctgcacatatcatggtagtgacgctgttctttggcccttgcatttttgtttatgtgcggcctttcagtaggttctctgtggacaagctgctgtctgtgttttataccatttttactccactcctgaaccccattatctacacattgagaaatgaggagatgaaagcagctatgaagaaactgcaaaaccgacgggtgacttttcaatga

SEQ ID NO: 449 - protein, 313 aa, Homo sapiens
MAGENHTTLPEFLLLGFSDLKALQGPLFWVVLLVYLVTLLGNSLIILLTQVSPALHSPMYFFLRQLSVVELFYTTDIVPRTLANLGSPHPQAISFQGCAAQMYVFIVLGISECCLLTAMAYDRYVAICQPLRYSTLLSPRACLAMVGSSWLTGIITATTHASLIFSLPFRSHPIIPHFLCDILPVLRLASAGKHRSEISVMTATIVFIMIPFSLIVTSYIRILGAILAMASTQSRRKVFSTCSSHLLVVSLFFGTASITYIRPQAGSSVTTDRVLSLFYTVITPMLNPIIYTLRNKDVRRALRHLVKRQRPSP

SEQ ID NO: 450 - DNA, 942 bp, Homo sapiens
atggctggggaaaaccatactacactgcctgaattcctccttctgggattctctgacctcaaggccctgcagggccccctgttctgggtggtgcttctggtctacctggtcaccttgctgggtaactccctgatcatcctcctcacacaggtcagccctgccctgcactcccccatgtacttcttcctgcgccaactctcagtggtggagctcttctacaccactgacatcgtgcccaggaccctggccaatctgggctccccgcatccccaggccatctctttccagggctgtgcagcccagatgtacgtcttcattgtcctgggcatctcggagtgctgcctgctcacggccatggcctatgaccgatatgttgccatctgccagcccctacgctattccaccctcttgagcccacgggcctgcttggccatggtggggtcctcctggctcacaggcatcatcacggccaccacccatgcctccctcatcttctctctaccttttcgcagccacccgatcatcccgcactttctctgtgacatcctgccagtactgaggctggcaagtgctgggaagcacaggagcgagatctccgtgatgacagccaccatagtcttcattatgatccccttctctctgattgtcacctcttacatccgcatcctgggtgccatcctagcaatggcctccacccagagccgccgcaaggtcttctccacctgctcctcccatctgctcgtggtctctctcttctttggaacagccagcatcacctacatccggccgcaggcaggctcctctgttaccacagaccgcgtcctcagtctcttctacacagtcatcacacccatgctcaaccccatcatctacacccttcggaacaaggacgtgaggagggccctgcgacacttggtgaagaggcagcgcccctcaccctga

SEQ ID NO: 451 - protein, 335 aa, Homo sapiens
MPQILIFTYLNMFYFFPPLQILAENLTMVTEFLLLGFSSLGEIQLALFVVFLFLYLVILSGNVTIISVIHLDKSLHTPMYFFLGILSTSETFYTFVILPKMLINLLSVARTISFNCCALQMFFFLGFAITNCLLLGVMGYDRYAAICHPLHYPTLMSWQVCGKLAAACAIGGFLASLTVVNLVFSLPFCSANKVNHYFCDISAVILLACTNTDVNEFVIFICGVLVLVVPFLFICVSYLCILRTILKIPSAEGRRKAFSTCASHLSVVIVHYGCASFIYLRPTANYVSNKDRLVTVTYTIVTPLLNPMVYSLRNKDVQLAIRKVLGKKGSLKLYN

SEQ ID NO: 452 - DNA, 1008 bp, Homo sapiens
atgccccaaattcttatattcacatacctgaatatgttttacttctttccccctttgcagatcttggcagaaaacctcaccatggtcaccgaattcctgttgctgggtttttccagccttggtgaaattcagctggccctctttgtagtttttctttttctgtatctagtcattcttagtggcaatgtcaccattatcagtgtcatccacctggataaaagcctccacacaccaatgtacttcttccttggcattctctcaacatctgagaccttctacacctttgtcattctacccaagatgctcatcaatctactttctgtggccaggacaatctccttcaactgttgtgctcttcaaatgttcttcttccttggttttgccattaccaactgcctgctattgggtgtgatgggttatgatcgctatgctgccatttgtcaccctctgcattaccccactcttatgagctggcaggtgtgtggaaaactggcagctgcctgtgcaattggtggcttcttggcctctcttacagtagtaaatttagttttcagcctccctttttgtagcgccaacaaagtcaatcattacttctgtgacatctcagcagtcattcttctggcttgtaccaacacagatgttaacgaatttgtgatattcatttgtggagttcttgtacttgtggttccctttctgtttatctgtgtttcttatctctgcattctgaggactatcctgaagattccctcagctgagggcagacggaaagcgttttccacctgcgcctctcacctcagtgttgttattgttcattatggctgtgcttccttcatctacctgaggcctacagcaaactatgtgtccaacaaagacaggctggtgacggtgacatacacgattgtcactccattactaaaccccatggtttatagcctcagaaacaaggatgtccaacttgctatcagaaaagtgttgggcaagaaaggttctctaaaactatataattga

SEQ ID NO: 453 - protein, 308 aa, Homo sapiens
MNTTLFHPYSFLLLGIPGLESMHLWVGFPFFAVFLTAVLGNITILFVIQTDSSLHHPMFYFLAILSSIDPGLSTSTIPKMLGTFWFTLREISFEGCLTQMFFIHLCTGMESAVLVAMAYDCYVAICDPLCYTLVLTNKVVSVMALAIFLRPLVFVIPFVLFILRLPFCGHQIIPHTYGEHMGIARLSCASIRVNIIYGLCAISILVFDIIAIVISYVQILCAVFLLSSHDARLKAFSTCGSHVCVMLTFYMPAFFSFMTHRFGRNIPHFIHILLANFYVVIPPALNSVIYGVRTKQIRAQVLKMFFNK

SEQ ID NO: 454 - DNA, 927 bp, Homo sapiens
atgaataccactctatttcatccttactctttccttcttctgggaattcctgggctggaaagtatgcatctctgggttggttttcctttctttgctgtgttcctgacagctgtccttgggaatatcaccatcctttttgtgattcagactgacagtagtctccatcatcccatgttctacttcctggccattctgtcatctattgacccgggcctgtctacatccaccatccctaaaatgcttggcaccttctggtttaccctgagagaaatctcctttgaaggatgccttacccagatgttcttcatccacctgtgcactggcatggaatcagctgtgcttgtggccatggcctatgattgctatgtggccatctgtgaccctctttgctacacgttggtgctgacaaacaaggtggtgtcagttatggcactggccatctttctgagacccttagtctttgtcataccctttgttctatttatcctaaggcttccattttgtggacaccaaattattcctcatacttatggtgagcacatgggcattgcccgcctgtcttgtgccagcatcagggttaacatcatctatggcttatgtgccatctctatcctggtctttgacatcatagcaattgtcatttcctatgtacagatcctttgtgctgtatttctactctcttcacatgatgcacgactcaaggcattcagcacctgtggctctcatgtgtgtgtcatgttgactttctatatgcctgcatttttctcattcatgacccataggtttggtcggaatatacctcactttatccacattcttctggctaatttctatgtagtcattccacctgctctcaactctgtaatttatggtgtcagaaccaaacagattagagcacaagtgctgaaaatgtttttcaataaataa

SEQ ID NO: 455 - protein, 313 aa, Homo sapiens
MEQVNKTVVREFVVLGFSSLARLQQLLFVIFLLLYLFTLGTNAIIISTIVLDRALHTPMYFFLAILSCSEICYTFVIVPKMLVDLLSQKKTISFLGCAIQMFSFLFFGSSHSFLLAAMGYDRYMAICNPLRYSVLMGHGVCMGLMAAACACGFTVSLVTTSLVFHLPFHSSNQLHHFFCDISPVLKLASQHSGFSQLVIFMLGVFALVIPLLLILVSYIRIISAILKIPSSVGRYKTFSTCASHLIVVTVHYSCASFIYLRPKTNYTSSQDTLISVSYTILTPLFNPMIYSLRNKEFKSALRRTIGQTFYPLS

SEQ ID NO: 456 - DNA, 942 bp, Homo sapiens
atggagcaagtcaataagactgtggtgagagagttcgtcgtcctcggcttctcatccctggccaggctgcagcagctgctctttgttatcttcctgctcctctacctgttcactctgggcaccaatgcaatcatcatttccaccattgtgctggacagagcccttcatactcccatgtacttcttccttgccatcctttcttgctctgagatttgctatacctttgtcattgtacccaagatgctggttgacctgctgtcccagaagaagaccatttctttcctgggctgtgccatccaaatgttttccttcctcttctttggctcctctcactccttcctgctggcagccatgggctatgatcgctatatggccatctgtaacccactgcgctactcagtgctcatgggacatggggtgtgtatgggactaatggctgctgcctgtgcctgtggcttcactgtctccctggtcaccacctccctagtatttcatctgcccttccactcctccaaccagctccatcacttcttctgtgacatctcccctgtccttaaactggcatctcagcactccggcttcagtcagctggtcatattcatgcttggtgtatttgccttggtcattcctctgctacttatcctagtctcctacatccgcatcatctctgccattctaaaaatcccttcctccgttggaagatacaagaccttctccacctgtgcctcccatctcattgtggtaactgttcactacagttgtgcctctttcatctacttaaggcccaagactaattacacttcaagccaagacaccctaatatctgtgtcatacaccatccttaccccattgttcaatccaatgatttatagtctgagaaataaggaattcaaatcagccctacgaagaacaatcggccaaactttctatcctcttagttaa

SEQ ID NO: 457 - protein, 369 aa, Homo sapiens
MWQEYYFLNVFFPLLKVCCLTINSHVVILLPWECYHLIWKILPYIGTTVGSMEEYNTSSTDFTFMGLFNRKETSGLIFAIISIIFFTALMANGVMIFLIQTDLRLHTPMYFLLSHLSLIDMMYISTIVPKMLVNYLLDQRTISFVGCTAQHFLYLTLVGAEFFLLGLMAYDRYVAICNPLRYPVLMSRRVCWMIIAGSWFGGSLDGFLLTPITMSFPFCNSREINHFFCEAPAVLKLACADTALYETVMYVCCVLMLLIPFSVVLASYARILTTVQCMSSVEGRKKAFATCSSHMTVVSLFYGAAMYTYMLPHSYHKPAQDKVLSVFYTILTPMLNPLIYSLRNKDVTGALKRALGRFKGPQRVSGGVF

SEQ ID NO: 458 - DNA, 1110 bp, Homo sapiens
atgtggcaagaatactattttttaaatgttttcttcccacttttaaaagtttgctgcctaacaattaattcacatgttgttattttactgccctgggaatgctatcatcttatttggaagatattaccttatatcggcacaactgtaggatcaatggaagagtacaacacatcctctacagacttcactttcatggggctgttcaacagaaaggaaacctcaggtcttatttttgccatcatctctatcatcttcttcaccgcactgatggccaatggggttatgatcttcctgatccaaacagatttgcgccttcatacacccatgtacttcctcctcagccacctttccttaattgacatgatgtatatttccactattgtgcctaagatgctggttaattacctgctggatcaaaggaccatttcctttgtggggtgcacagctcaacacttcctctaccttacccttgtgggagctgaattcttcctgctgggcctcatggcctatgaccgctatgtggccatttgcaaccctctgagataccctgtcctcatgagccgccgggtctgttggatgattatagcaggttcctggtttgggggctctttggatggcttcctcctaacccccatcaccatgagctttcccttctgcaattcccgggagattaaccacttcttctgtgaggcaccagcagtcctgaagttggcatgtgcagacacagccctctacgagacagtgatgtatgtgtgctgtgttttgatgctgctgattcctttctctgtagtccttgcttcctatgcccgaatcctgactacagttcagtgcatgagctcagtggagggcaggaagaaggcatttgccacttgctcatcccacatgactgtggtgtccttgttctacggggctgccatgtacacctacatgctgccacattcttaccacaagccagcccaggacaaagtcctctctgtgttttacaccattctcacacccatgctgaaccccctcatctacagccttagaaacaaggatgtgactggagctctgaagagggccttggggaggttcaagggtcctcaaagggtgtcaggaggtgtcttttga

SEQ ID NO: 459 - protein, 312 aa, Homo sapiens
MDLKNGSLVTEFILLGFFGRWELQIFFFVTFSLIYGATVMGNILIMVTVTCRSTLHSPLYFLLGNLSFLDMCLSTATTPKMIIDLLTDHKTISVWGCVTQMFFMHFFGGAEMTLLIIMAFDRYVAICKPLHYRTIMSHKLLKGFAILSWIIGFLHSISQIVLTMNLPFCGHNVINNIFCDLPLVIKLACIETYTLELFVIADSGLLSFTCFILLLVSYIVILVSVPKKSSHGLSKALSTLSAHIIVVTLFFGPCIFIYVWPFSSLASNKTLAVFYTVITPLLNPSIYTLRNKKMQEAIRKLRFQYVSSAQNF

SEQ ID NO: 460 - DNA, 939 bp, Homo sapiens
atggatcttaaaaatggatctctagtgaccgagtttattttactaggattttttggacgatgggaacttcaaattttcttctttgtgacattttccctgatctacggtgctactgtgatgggaaacattctcattatggtcacagtgacatgtaggtcaacccttcattctcccttgtactttctccttggaaatctctcttttttggacatgtgtctctccactgccacaacacccaagatgatcatagatttgctcactgaccacaagaccatctctgtgtggggctgcgtgacccagatgttcttcatgcacttctttgggggtgctgagatgactcttctgataatcatggcctttgacaggtatgtagccatatgtaaacccctgcactataggacaatcatgagccacaagctgctaaaggggtttgcgatactttcatggataattggttttttacactccataagccagatagttttaacaatgaacttgcctttctgtggccacaatgtcataaacaacatattttgtgatcttccccttgtgatcaagcttgcttgcattgaaacatacaccctggaattatttgtcattgctgacagcgggctgctctctttcacctgtttcatcctcttgcttgtttcttacattgtcatcctggtcagtgtaccaaaaaaatcatcacatgggctctccaaggcgctgtccacattgtctgcccacatcattgtggtcactctgttctttggaccttgtatttttatctatgtttggccattcagtagtttggcaagcaataaaactcttgccgtattttatacagttatcacacccttactgaatccgagtatttataccctgagaaataagaaaatgcaagaggccataagaaaattacggttccaatatgttagttctgcacagaatttctag

SEQ ID NO: 461 - protein, 313 aa, Homo sapiens
MSPENQSSVSEFLLLGLPIRPEQQAVFFTLFLGMYLTTVLGNLLIMLLIQLDSHLHTPMYFFLSHLALTDISFSSVTVPKMLMDMRTKYKSILYEECISQMYFFIFFTDLDSFLITSMAYDRYVAICHPLHYTVIMREELCVFLVAVSWILSCASSLSHTLLLTRLSFCAANTIPHVFCDLAALLKLSCSDIFLNELVMFTVGVVVITLPFMCILVSYGYIGATILRVPSTKGIHKALSTCGSHLSVVSLYYGSIFGQYLFPTVSSSIDKDVIVALMYTVVTPMLNPFIYSLRNRDMKEALGKLFSRATFFSW

SEQ ID NO: 462 - DNA, 966 bp, Homo sapiens
atgagccctgagaaccagagcagcgtgtccgagttcctccttctgggcctccccatccggccagagcagcaggctgtgttcttcaccctgttcctgggcatgtacctgaccacggtgctggggaacctgctcatcatgctgctcatccagctggactctcaccttcacacccccatgtacttcttcctcagccacttggctctcactgacatctccttttcatctgtcactgtccctaagatgctgatggacatgcggactaagtacaaatcgatcctctatgaggaatgcatttctcagatgtatttttttatattttttactgacctggacagcttccttattacatcaatggcatatgaccgatatgttgccatatgtcaccctctccactacactgtcatcatgagggaagagctctgtgtcttcttagtggctgtatcttggattctgtcttgtgccagctccctctctcacacccttctcctgacccggctgtctttctgtgctgcgaacaccatcccccatgtcttctgtgaccttgctgccctgctcaagctgtcctgctcagatatcttcctcaatgagctggtcatgttcacagtaggggtggtggtcattaccctgccattcatgtgtatcctggtatcatatggctacattggggccaccatcctgagggtcccttcaaccaaagggatccacaaagcattgtccacatgtggctcccatctctctgtggtgtctctctattatgggtcaatatttggccagtaccttttcccgactgtaagcagttctattgacaaggatgtcattgtggctctcatgtacacggtggtcacacccatgttgaacccctttatctacagccttaggaacagggacatgaaagargcccttgggaaactcttcagtagagcaacatttttctccttggtgacatctgactttttaaaaaattag

SEQ ID NO: 463 - protein, 307 aa, Homo sapiens
MGQHNLTVLTEFILMELTRRPELQIPLFGVFLVIYLITVVGNLTMIILTKLDSHLHTPMYFSIRHLASVDLGNSTVICPKVLANFVVDRNTISYYACAAQLAFFLMFIISEFFILSAMAYDRYVAICNPLLYYVIMSQRLCHVLVGIQYLYSTFQALMFTIKIFTLTFCGSNVISHFYCDDVPLLPMLCSNAQEIELLSILFSVFNLISSFLIVLVSYMLILLAICQMHSAEGRKKAFSTCGSHLTVVVVFYGSLLFMYMQPNSTHFFDTDKMASVFYTLVIPMLNPLIYSLRNEEVKNAFYKLFEN

SEQ ID NO: 464 - DNA, 924 bp, Homo sapiens
atgggccaacacaatctaacagtgctaactgaattcattctgatggaactcacaaggcggcctgagctgcagattcccctttttggagtcttcctcgtcatctacctaatcacagtggtgggcaacctaactatgatcattttgaccaaactggactcccacttacatacacctatgtacttttctatcagacatttggcttctgttgatcttggtaattctactgtcatttgtcccaaggtgctggcaaattttgttgtggatcgaaatactatttcctattatgcatgtgctgcacagctggcattcttccttatgttcattatcagtgaatttttcatcctgtcagccatggcctatgaccgctatgtggccatttgtaaccctctgctctattatgttattatgtctcagcgactgtgtcatgtactggtgggcattcaatatctctacagcacatttcaggctctgatgttcactattaagatttttacattgaccttctgtggctctaatgtcatcagtcatttttactgtgatgatgttcctttgctacctatgctttgctcaaatgcacaggaaatagaattgttgagcatactattttctgtatttaatttgatctcctcctttctgatagtcttagtgtcctacatgttgattttgttagctatatgtcaaatgcattctgcagagggcaggaaaaaggctttctccacatgtggttcccatttgacagtggtggttgtgttctatgggtctctactcttcatgtacatgcagcccaattccactcacttctttgatactgataaaatggcttctgtgttttacactttagtaatccccatgcttaaccctttgatttacagcttaagaaacgaagaggtgaaaaatgccttctataagctctttgagaattga

SEQ ID NO: 465 - protein, 340 aa, Homo sapiens
MPCMPCALPTGGLLPHPQHTMMEIANVSSPEVFVLLGFSTRPSLETVLFIVVLSFYMVSILGNGIIILVSHTDVHLHTPMYFFLANLPFLDMSFTTSIVPQLLANLWGPQKTISYGGCVVQFYISHWLGATECVLLATMSYDRYAAICRPLHYTVIMHPQLCLGLALASWLGGLTTSMVGSTLTMLLPLCGNNCIDHFFCEMPLIMQLACVDTSLNEMEMYLASFVFVVLPLGLILVSYGHIARAVLKIRSAEGRRKAFNTCSSHVAVVSLFYGSIIFMYLQPAKSTSHEQGKFIALFYTVVTPALNPLIYTLRNTEVKSALRHMVLENCCGSAGKLAQI

SEQ ID NO: 466 - DNA, 1023 bp, Homo sapiens
atgccctgtatgccctgtgctcttcccacaggtggccttttgccccacccccagcatacaatgatggaaatagccaatgtgagttctccagaagtctttgtcctcctgggcttctccacacgaccctcactagaaactgtcctcttcatagttgtcttgagtttttacatggtatcgatcttgggcaatggcatcatcattctggtctcccatacagatgtgcacctccacacacctatgtacttctttcttgccaacctccccttcctggacatgagcttcaccacgagcattgtcccacagctcctggctaacctctggggaccacagaaaaccataagctatggagggtgtgtggtccagttctatatctcccattggctgggggcaaccgagtgtgtcctgctggccaccatgtcctatgaccgctacgctgccatctgcaggccactccattacactgtcattatgcatccacagctttgccttgggctagctttggcctcctggctggggggtctgaccaccagcatggtgggctccacgctcaccatgctcctaccgctgtgtgggaacaattgcatcgaccacttcttttgcgagatgcccctcattatgcaactggcttgtgtggataccagcctcaatgagatggagatgtacctggccagctttgtctttgttgtcctgcctctggggctcatcctggtctcttacggccacattgcccgggccgtgttgaagatcaggtcagcagaagggcggagaaaggcattcaacacctgttcttcccacgtggctgtggtgtctctgttttacgggagcatcatcttcatgtatctccagccagccaagagcacctcccatgagcagggcaagttcatagctctgttctacaccgtagtcactcctgcgctgaacccacttatttacaccctgaggaacacggaggtgaagagcgccctccggcacatggtattagagaactgctgtggctctgcaggcaagctggcgcaaatttag

SEQ ID NO: 467 - protein, 338 aa, Homo sapiens
MKSQIEKSDLKYRAILLQKVTRMFLLFWVLLLVLSRLLVVMGRGNSTEVTEFHLLGFGVQHEFQHVLFIVLLLIYVTSLIGNIGMILLIKTDSRLQTPMYFFPQHLAFVDICYTSAITPKMLQSFTEENNLITFRGCVIQFLVYATFATSDCYLLAIMAMDCYVAICKPLRYPMIMSQTVYIQLVAGSYIIGSINASVHTGFTFSLSFCKSNKINHFFCDGLPILALSCSNIDINIILDVVFVGFDLMFTELVIIFSYIYIMVTILKMSSTAGRKKSFSTCASHLTAVTIFYGTLSYMYLQPQSNNSQENMKVASIFYGTVIPMLNPLIYSLRNKEGK

SEQ ID NO: 468 - DNA, 1017 bp, Homo sapiens
atgaaaagtcaaattgaaaaaagtgacttaaaatatagagccattttattgcaaaaagtcacaaggatgttcctgcttttctgggtccttctcttggtcctttctagacttttggtagtcatgggtcgaggaaacagcactgaagtgactgaattccatcttctgggatttggtgtccaacacgaatttcagcatgtccttttcattgtacttcttcttatctatgtgacctccctgataggaaatattggaatgatcttactcatcaagaccgattccagacttcaaacacccatgtacttttttccacaacatttggcttttgttgatatctgttatacttctgctatcactcccaagatgctccaaagcttcacagaagaaaataatttgataacatttcggggctgtgtgatacaattcttagtttatgcaacatttgcaaccagtgactgttacctcctagctattatggcaatggattgttatgttgccatctgtaagccccttcgctatcccatgatcatgtcccaaacagtctacatccaactcgtagctggctcatatattataggctcaataaatgcctctgtacatacaggttttacattttcactgtccttctgcaagtctaataaaatcaatcactttttctgtgatggtctcccaattcttgccctttcatgctccaacattgacatcaacatcattctagatgttgtctttgtgggatttgacttgatgttcactgagttggtcatcatcttttcctacatctacattatggtcaccatcctgaagatgtcttctactgctgggaggaaaaaatccttctccacatgtgcctcccacctgacagcagtaaccattttctatgggacactctcttacatgtacttacagcctcagtctaataattctcaggagaatatgaaagtagcctctatattttatggcactgttattcccatgttgaatcctttaatctatagcttgagaaataaggaaggaaaataa

SEQ ID NO: 469 - protein, 311 aa, Homo sapiens
MENQSSISEFFLRGISAPPEQQQSLFGIFLCMYLVTLTGNLLIILAIGSDLHLHTPMYFFLANLSFVDMGLTSSTVTKMLVNIQTRHHTISYTGCLTQMYFFLMFGDLDSFFLAAMAYDRYVAICHPLCYSTVMRPQVCALMLALCWVLTNIVALTHTFLMARLSFCVTGEIAHFFCDITPVLKLSCSDTHINEMMVFVLGGTVLIVPFLCIVTSYIHIVPAILRVRTRGGVGKAFSTCSSHLCVVCVFYGTLFSAYLCPPSIASEEKDIAAAAMYTIVTPMLNPFIYSLRNKDMKGALKRLFSHRSIVSS

SEQ ID NO: 470 - DNA, 936 bp, Homo sapiens
atggaaaaccaatccagcatttctgaatttttcctccgaggaatatcagcgcctccagagcaacagcagtccctcttcggaattttcctgtgtatgtatcttgtcaccttgactgggaacctgctcatcatcctggccattggctctgacctgcacctccacacccccatgtactttttcttggccaacctgtcttttgttgacatgggtttaacgtcctccacagttaccaagatgctggtgaatatacagactcggcatcacaccatctcctatacgggttgcctcacgcaaatgtatttctttctgatgtttggtgatctagacagcttcttcctggctgccatggcgtatgaccgctatgtggccatttgccaccccctctgctactccacagtcatgaggccccaagtctgtgccctaatgcttgcattgtgctgggtcctcaccaatatcgttgccctgactcacacgttcctcatggctcggttgtccttctgtgtgactggggaaattgctcactttttctgtgacatcactcctgtcctgaagctgtcatgttctgacacccacatcaacgagatgatggtttttgtcttgggaggcaccgtactcatcgtcccctttttatgcattgtcacctcctacatccacattgtgccagctatcctgagggtccgaacccgtggtggggtgggcaaggccttttccacctgcagttcccacctctgcgttgtttgtgtgttctatgggaccctcttcagtgcctacctgtgtcctccctccattgcctctgaagagaaggacattgcagcagctgcaatgtacaccatagtgactcccatgttgaacccctttatctatagcctaaggaacaaggacatgaagggggccctaaagaggctcttcagtcacaggagtattgtttcctcttag

SEQ ID NO: 471 - protein, 309 aa, Homo sapiens
MEGNKTWITDITLPRFQVGPALEILLCGLFSAFYTLTLLGNGVIFGIICLDCKLHTPMYFFLSHLAIVDISYASNYVPKMLTNLMNQESTISFFPCIMQTFLYLAFAHVECLILVVMSYDRYADICHPLRYNILMSWRVCTVLAVASWVFSFLLALVPLVLILRLPFCGPHEINHFCEILSVLKLACADTWLNQVVIFAACVFILVGPLCLVLVSYLRILAAILRIQSGEGRRKAFSTCSSHLCVVGLFFGSAIVTYMAPKSRHPEEQQKVLSLFYSLFNPMLNPLIYSLRNAEVKGALRRALRKERLT

SEQ ID NO: 472 - DNA, 930 bp, Homo sapiens
atggaaggcaacaagacatggatcacagacatcaccttgccgcgattccaggttggtccagcactggagattctcctctgtggacttttctctgccttctatacactcaccctgctggggaatggggtcatctttgggattatctgcctggactgtaagcttcacacacccatgtacttcttcctctcacacctggccattgttgacatatcctatgcttccaactatgtccccaagatgctgacgaatcttatgaaccaggaaagcaccatctccttttttccatgcataatgcagacattcttgtatttggcttttgctcacgtagagtgtctgattttggtggtgatgtcctatgatcgctatgcggacatctgccaccccttacgttacaatatcctcatgagctggagagtgtgcactgtcctggctgtggcttcctgggtgttcagcttcctcctggctctggtccctttagttctcatcctgaggctgcccttctgcgggcctcatgaaatcaaccacttctgtgaaatcctgtctgtcctcaagttggcctgtgctgacacctggctcaaccaggtggtcatctttgcagcctgcgtgttcatcctggtggggccactctgcctggtgctggtctcctacttgcgcatcctggccgccatcttgaggatccagtctggggagggccgcagaaaggccttctccacctgctcctcccacctttgcgtggtgggactcttctttggcagcgccattgtcacgtacatggcccccaagtcccgccatcctgaggagcagcagaaagttctttccctgttttacagccttttcaatccaatgctgaaccccctgatatatagcctaaggaatgcagaggtcaagggcgccctgaggagggcactgaggaaggagaggctgacgtga

SEQ ID NO: 473 - protein, 312 aa, Homo sapiens
MRLANQTLGGDFFLLGIFSQISHPGRLCLLIFSIFLMAVSWNITLILLIHIDSSLHTPMYFFINQLSLIDLTYISVTVPKMLVNQLAKDKTISVLGCGTQMYFYLQLGGAECCLLAAMAYDRYVAICHPLRYSVLMSHRVCLLLASGCWFVGSVDGFMLTPIAMSFPFCRSHEIQHFFCEVPAVLKLSCSDTSLYKIFMYLCCVIMLLIPVTVISVSYYYIILTIHKMNSVEGRKKAFTTCSSHITVVSLFYGAAIYNYMLPSSYQTPEKDMMSSFFYTILTPVLNPIIYSFRNKDVTRALKKMLSVQKPPY

SEQ ID NO: 474 - DNA, 939 bp, Homo sapiens
atgcggctggccaaccagaccctgggtggtgactttttcctgttgggaatcttcagccagatctcacaccctggccgcctctgcttgcttatcttcagtatatttttgatggctgtgtcttggaatattacattgatacttctgatccacattgactcctctctgcatactcccatgtacttctttataaaccagctctcactcatagacttgacatatatttctgtcactgtccccaaaatgctggtgaaccagctggccaaagacaagaccatctcggtccttgggtgtggcacccagatgtacttctacctgcagttgggaggtgcagagtgctgccttctagccgccatggcctatgaccgctatgtggctatctgccatcctctccgttactctgtgctcatgagccatagggtatgtctcctcctggcatcaggctgctggtttgtgggctcagtggatggcttcatgctcactcccatcgccatgagcttccccttctgcagatcccatgagattcagcacttcttctgtgaggtccctgctgttttgaagctctcttgctcagacacctcactttacaagattttcatgtacttgtgctgtgtcatcatgctcctgatacctgtgacggtcatttcagtgtcttactactatatcatcctcaccatccataagatgaactcagttgagggtcggaaaaaggccttcaccacctgctcctcccacattacagtggtcagcctcttctatggagctgctatttacaactacatgctccccagctcctaccaaactcctgagaaagatatgatgtcatcctttttctacactatccttacacctgtcttgaatcctatcatttacagtttcaggaataaggatgtcacaagggctttgaaaaaaatgctgagcgtgcagaaacctccatattaa

SEQ ID NO: 475 - protein, 331 aa, Homo sapiens
MTFFSSGGNCEPVMCSGNQTSQNQTASTDFTLTGLFAESKHAALLYTVTFLLFLMALTGNALLILLIHSEPRLHTPMYFFISQLALMDLMYLCVTVPKMLVGQVTGDDTISPSGCGIQMFFHLTLAGAEVFLLAAMAYDRYAAVCRPLHYPLLMNQRVCQLLVSACWVLGMVDGLLLTPITMSFPFCQSRKILSFFCETPALLKLSCSDVSLYKMLTYLCCILMLLTPIMVISSSYTLILHLIHRMNSAAGRRKALATCSSHMIIVLLLFGASFYTYMLRSSYHTAEQDMMVSAFYTIFTPVLNPLIYSLRNKDVTRALRSMMQSRMNQEK

SEQ ID NO: 476 - DNA, 996 bp, Homo sapiens
atgacttttttttcctcagggggaaactgtgagccagtcatgtgctcagggaatcagacttctcagaatcaaacagcaagcactgatttcaccctcacgggactctttgctgagagcaagcatgctgccctcctctacaccgtgaccttccttcttttcttgatggccctcactgggaatgccctcctcatcctcctcatccactcagagccccgcctccacacccccatgtacttcttcatcagccagctcgcgctcatggatctcatgtacctatgcgtgactgtgcccaagatgcttgtgggccaggtcactggagatgataccatttccccgtcaggctgtgggatccagatgttcttccacctgaccctggctggagctgaggttttcctcctggctgccatggcctatgaccgatatgctgctgtttgcagacctctccattacccactgctgatgaaccagagggtgtgccagctcctggtgtcagcctgctgggttttgggaatggttgatggtttgttgctcacccccattaccatgagcttccccttttgccagtctaggaaaatcctgagttttttctgtgagactcctgccctgctgaagctctcctgctctgacgtctccctctataagatgctcacgtacctgtgctgcatcctcatgcttctcacccccatcatggtcatctccagctcatacaccctcatcctgcatctcatccacaggatgaattctgccgccggccgcaggaaggccttggccacctgctcctcccacatgatcatagtgctgctgctcttcggtgcttccttctacacctacatgctccggagttcctaccacacagctgagcaggacatgatggtgtctgccttttacaccatcttcactcctgtgctgaaccccctcatttacagtctccgcaacaaagatgtcaccagggctctgaggagcatgatgcagtcaagaatgaaccaagaaaagtag

SEQ ID NO: 477 - protein, 316 aa, Homo sapiens
MTNTSSSDFTLLGLLVNSEAAGIVFTVILAVFLGAVTANLVMIFLIQVDSRLHTPMYFLLSQLSIMDTLFICTTVPKLLADMVSKEKIISFVACGIQIFLYLTMIGSEFFLLGLMAYDCYVAVCNPLRYPVLMNRKKCLLLAAGAWFGGSLDGFLLTPITMNVPYCGSRSINHFFCEIPAVLKLACADTSLYETLMYICCVLMLLIPISIISTSYSLILLTIHRMPSAEGRKKAFTTCSSHLTVVSIFYGAAFYTYVLPQSFHTPEQDKVVSAFYTIVTPMLNPLIYSLRNKDVIGAFKKVFACCSSAQKVATSDA

SEQ ID NO: 478 - DNA, 951 bp, Homo sapiens
atgacgaacacatcatcctctgacttcaccctcctggggcttctggtgaacagtgaggctgccgggattgtatttacagtgatccttgctgttttcttgggggccgtgactgcaaatttggtcatgatattcttgattcaggtggactctcgcctccacacccccatgtactttctgctcagtcagctgtccatcatggacacccttttcatctgtaccactgtcccaaaactcctggcagacatggtttctaaagagaagatcatttcctttgtggcctgtggcatccagatcttcctctacctgaccatgattggttctgagttcttcctcctgggcctcatggcctatgactgctacgtggctgtctgtaaccctctgagatacccagtcctgatgaaccgcaagaagtgtcttttgctggctgctggtgcctggtttgggggctccctcgatggctttctgctcactcccatcaccatgaatgtcccttactgtggctcccgaagtatcaaccattttttctgtgagatcccagcagttctgaaactggcctgtgcagacacgtccttgtatgaaactctgatgtacatctgctgtgtcctcatgttgctcatccccatctctatcatctccacttcctactccctcatcttgttaaccatccaccgcatgccctctgctgaaggtcgcaaaaaggccttcaccacttgttcctcccacttgactgtagttagcatcttctatggggctgccttctacacatacgtgctgccccagtccttccacacccccgagcaggacaaagtagtgtcagccttctataccattgtcacgcccatgcttaatcctctcatctacagcctcagaaacaaggacgtcataggggcatttaaaaaggtatttgcatgttgctcatctgctcagaaagtagcaacaagtgatgcttag

SEQ ID NO: 479 - protein, 317 aa, Homo sapiens
MEQSNYSVYADFILLGLFSNARFPWLLFALILLVFLTSIASNVVKIILIHIDSRLHTPMYFLLSQLSLRDILYISTIVPKMLVDQVMSQRAISFAGCTAQHFLYLTLAGAEFFLLGLMSYDRYVAICNPLHYPVLMSRKICWLIVAAAWLGGSIDGFLLTPVTMQFPFCASREINHFFCEVPALLKLSCTDTSAYETAMYVCCIMMLLIPFSVISGSYTRILITVYRMSEAEGRGKAVATCSSHMVVVSLFYGAAMYTYVLPHSYHTPEQDKAVSAFYTILTPMLNPLIYSLRNKDVTGALQKVVGRCVSSGKVTTF

SEQ ID NO: 480 - DNA, 954 bp, Homo sapiens
atggagcagagcaattattccgtgtatgccgactttatccttctgggtttgttcagcaacgcccgtttcccctggcttctctttgccctcattctcctggtctttttgacctccatagccagcaacgtggtcaagatcattctcatccacatagactcccgcctccacacccccatgtacttcctgctcagccagctctccctcagggacatcctgtatatttccaccattgtgcccaaaatgctggtcgaccaggtgatgagccagagagccatttcctttgctggatgcactgcccaacacttcctctacttgaccttagcaggggctgagttcttcctcctaggactcatgtcctatgatcgctacgtagccatctgcaaccctctgcactatcctgtcctcatgagccgcaagatctgctggttgattgtggcggcagcctggctgggagggtctatcgatggtttcttgctcacccccgtcaccatgcagttccccttctgtgcctctcgggagatcaaccacttcttctgcgaggtgcctgcccttctgaagctctcctgcacggacacatcagcctacgagacagccatgtatgtctgctgtattatgatgctcctcatccctttctctgtcatctcgggctcttacacaagaattctcattactgtttataggatgagcgaggcagaggggaggggaaaggctgtggccacctgctcctcacacatggtggttgtcagcctcttctatggggctgccatgtacacatacgtgctgcctcattcttaccacacccctgagcaggacaaagctgtatctgccttctacaccatccttactcccatgctcaatccactcatttacagccttaggaacaaggatgtcacaggggccctacagaaggttgtggggaggtgtgtgtcctcaggaaaggtaaccactttctaa

SEQ ID NO: 481 - protein, 311 aa, Homo sapiens
MGGKQPWVTEFILVGFQVGPALAILLCGLFSVFYTLTLLGNGVIFGIICLDSKLHTPMYFFLSHLAIIDMSYASNNVPKMLANLMNQKSTISFVPCIMQTFLYLAFAVTECLILVVMSYDRYVAICHPFQYTVIMSWRVCTILASTCWIISFLMALVHITHILRPPFCGPQKINHFICQIMSVFKLACAGPRLNQVVLYAGSAFIVEGPLCLELVSNLHILSRHLEDPVMGRAADRLTLPAPSHLCMVGLLFGSTMVMYMAPKSRHPEEQQKVLSLFYSLFNPMLNPLIYSLRNAEVKGALKRVLWKQRSK

SEQ ID NO: 482 - DNA, 936 bp, Homo sapiens
atgggaggcaagcagccctgggtcacagaattcatcctggtgggattccaggttggtccagcactggcgattctcctctgtggactcttctctgtcttctatacactcaccctgctggggaatggggtcatctttgggattatctgcctggactctaagcttcacacacccatgtacttcttcctctcacacctggccatcattgacatgtcctatgcttccaacaatgttcccaagatgttggcaaacctaatgaaccagaaaagcaccatctcctttgttccatgcataatgcagacttttttgtatttggcttttgctgttacagagtgcctgattttggtggtgatgtcctatgataggtatgtggccatctgccaccctttccagtacactgtcatcatgagctggagagtgtgcacgatcctggcctcaacatgctggataattagctttctcatggctctggtccatataactcatattctgaggccgcctttttgtggcccacaaaagatcaaccactttatctgtcaaatcatgtccgtattcaaattggcctgtgctggccctaggctcaaccaggtggtcctatatgcgggttctgcgttcatcgtagaggggccgctctgcctggagctggtctccaacttgcacatcctgtcgcgccatcttgaggatccagtaatggggagggccgcagaccgacttactcttcctgctccttcccacctttgcatggtgggactcctttttggcagcaccatggtcatgtacatggcccccaagtcccgccaccctgaggagcagcagaaggtcctttccctgttttacagccttttcaacccgatgctgaaccccttgatctacagcctgaggaacgcagaggtcaagggtgccctgaaaagagtgttgtggaaacagagatcaaagtga

SEQ ID NO: 483 - protein, 310 aa, Homo sapiens
MESNQTWITEVILLGFQVDPALELFLFGFFLLFYSLTLMGNGIILGLIYLDSRLHTPMYVFLSHLAIVDMSYASSTVPKMLANLVMHKKVISFAPCILQTFLYLAFAITECLILVMMCYDRYVAICHPLQYTLIMNWRVCTVLASTCWIFSFLLALVHITLILRLPFCGPQKINHFFCQIMSVFKLACADTRLNQVVLFAGSAFILVGPLCLVLVSYLHILVAILRIQSGEGRRKAFSTCSSHLCVVGLFFGSAIVMYMAPKSSHSQERRKILSLFYSLFNPILNPLIYSLRNAEVKGALKRVLWKQRSM

SEQ ID NO: 484 - DNA, 933 bp, Homo sapiens
atggaaagcaatcagacctggatcacagaagtcatcctgttgggattccaggtggacccagctctggagttgttcctctttgggtttttcttgctattctacagcttaaccctgatgggaaatgggattatcctggggctcatctacttggactctagactgcacacacccatgtatgtcttcctgtcacacctggccattgtggacatgtcctatgcctcgagtactgtccctaagatgctagcaaatcttgtgatgcacaaaaaagtcatctcctttgctccttgcatacttcagacttttttgtatttggcgtttgctattacagagtgtctgattttggtgatgatgtgctatgatcggtatgtggcaatctgtcaccccttgcaatacaccctcattatgaactggagagtgtgcactgtcctggcctcaacttgctggatatttagctttctcttggctctggtccatattactcttattctgaggctgcctttttgtggcccacaaaagatcaaccactttttctgtcaaatcatgtccgtattcaaattggcctgtgctgacactaggctcaaccaggtggtcctatttgcgggttctgcgttcatcttagtggggccgctctgcctggtgctggtctcctacttgcacatcctggtggccatcttgaggatccagtctggggagggccgcagaaaggccttctctacctgctcctcccacctctgcgtggtggggcttttctttggcagcgccattgtcatgtacatggcccccaagtcaagccattctcaagaacggaggaagatcctttccctgttttacagccttttcaacccgatcctgaaccccctcatctacagccttaggaatgcagaggtgaaaggggctctaaagagagtcctttggaaacagagatcaatgtga

SEQ ID NO: 485 - protein, 310 aa, Homo sapiens
MGDNQSRVTEFILVGFQLSVEMEVLLFWIFSLLYLFSLLANGMILGLICLDPRLRTPMYFFLSHLAVIDIYYASSNLLNMLENLVKHKKTISFISCIMQMALYLTFAAAVCMILVVMSYDRFVAICHPLHYTVIMNWRVCTVLAITSWACGFSLALINLILLLRLPFCGPQEVNHFFGEILSVLKLACADTWINEIFVFAGGVFVLVGPLSLMLISYMRILLAILKIQSKEGRKKAFSTCSSHLCVVGLYFGMAMVVYLVPDNSQRQKQQKILTLFYSLFNPLLNPLIYSLRNAQVKGALYRALQKKRTM

SEQ ID NO: 486 - DNA, 933 bp, Homo sapiens
atgggggacaaccaatcacgggtcacagaattcatcctggttggattccagctcagtgtggagatggaagtgctcctcttctggatcttctccctgttatatctcttcagcctgctggcaaatggcatgatcttggggctcatctgtctggatcccagactgcgcacccccatgtacttcttcctgtcacacttggccgtcattgacatatactatgcttccagcaatttgctcaacatgctggaaaacctagtgaaacacaaaaaaactatctcgttcatctcttgcattatgcagatggctttgtatttgacttttgctgctgcagtgtgcatgattttggtggtgatgtcctatgacagatttgtggcgatctgccatcccctgcattacactgtcatcatgaactggagagtgtgcacagtactggctattacttcctgggcatgtggattttccctggccctcataaatctaattctccttctaaggctgcccttctgtgggccccaggaggtgaaccacttcttcggtgaaattctgtctgtcctcaaactggcctgtgcagacacctggattaatgaaatttttgtctttgctggtggtgtgtttgtcttagtcgggcccctttccttgatgctgatctcctacatgcgcatcctcttggccatcctgaagatccagtcaaaggagggccgcaaaaaagccttttccacctgctcctcccacctctgtgtggttgggctttactttggcatggccatggtggtttacctggtcccagacaacagtcaacgacagaagcagcagaaaattctcaccctgttttacagccttttcaacccattgctgaaccccctcatctacagcctgcggaatgctcaagtgaagggtgccttatacagagcactgcagaaaaagaggaccatgtga

SEQ ID NO: 487 - protein, 312 aa, Homo sapiens
MPSINDTHFYPPFFLLLGIPGLDTLHIWISFPFCIVYLIAIVGNMTILFVIKTEHSLHQPMFYFLAMLSMIDLGLSTSTIPKMLGIFWFNLQEISFGGCLLQMFFIHMFTGMETVLLVVMAYDRFVAICNPLQYTMILTNKTISILASVVVGRNLVLVTPFVFLILRLPFCGHNIVPHTYCEHRGLAGLACAPIKINIIYGLMVISYIIVDVILIASSYVLILRAVFRLPSQDVRLKAFNTCGSHVCVMLCFYTPAFFSFMTHRFGQNIPHYIHILLANLYVVVPPALNPVIYGVRTKQIREQIVKIFVQKE

SEQ ID NO: 488 - DNA, 939 bp, Homo sapiens
atgccttctatcaatgacacccacttctatccccccttcttcctcctgctaggaataccaggactggacactttacatatctggatttctttcccattctgtattgtgtacctgattgccattgtggggaatatgaccattctctttgtgatcaaaactgaacatagtctacaccagcccatgttctacttcctggccatgttgtctatgattgatctgggtctgtccacatccactatccccaaaatgctaggaatcttctggttcaacctccaagagatcagctttgggggatgccttcttcagatgttctttattcacatgtttacaggcatggagactgttctgttggtggtcatggcttatgaccgctttgttgccatctgcaaccctctccagtacaccatgatcctcaccaataaaaccatcagtatcctagcttctgtggttgttggaagaaatttagttcttgtaaccccatttgtgtttctcattctgcgtctgccattctgtgggcataacatcgtacctcacacatactgtgagcacaggggtctggccgggttggcctgtgcacccattaagatcaacataatctatgggctcatggtgatttcttatattattgtggatgtgatcttaattgcctcttcctatgtgcttatccttagagctgtttttcgccttccctctcaagatgtccgactaaaggccttcaatacctgtggttctcatgtctgtgttatgctgtgcttttacacaccagcatttttttcttttatgacacatcgttttggccaaaacattccccactatatccatattcttttggctaacctgtatgtggttgtcccacctgcccttaaccctgtcatttatggagtcaggaccaagcagatccgagagcaaattgtgaaaatatttgtacagaaagaataa

SEQ ID NO: 489 - protein, 327 aa, Homo sapiens
MLHTNNTQFHPSTFLVVGVPGLEDVHVWIGFPFFAVYLTALLGNIIILFVIQTEQSLHQPMFYFLAMLAGTDLGLSTATIPKMLGIFWFNLGEIAFGACITQMYTIHICTGLESVVLTVTGIDRYIAICNPLRYSMILTNKVIAILGIVIIVRTLVFVTPFTFLTLRLPFCGVRIIPHTYCEHMGLAKLACASINVIYGLIAFSVGYIDISVIGFSYVQILRAVFHLPAWDARLKALSTCGSHVCVMLAFYLPALFSFMTHRFGHNIPHYIHILLANLYVVFPPALNSVIYGVKTKQIREQVLRILNPKSFWHFDPKRIFHNNSVRQ

SEQ ID NO: 490 - DNA, 984 bp, Homo sapiens
atgcttcataccaacaatacacagtttcacccttccaccttcctcgtagtgggggtcccagggctggaagatgtgcatgtatggattggcttccccttctttgcggtgtatctaacagcccttctagggaacatcattatcctgtttgtgatacagactgaacagagcctccaccaacccatgttttacttcctagccatgttggccggcactgatctgggcttgtctacagcaaccatccccaagatgctgggaattttctggtttaatcttggagagattgcatttggtgcctgcatcacacagatgtataccattcatatatgcactggcctggagtctgtggtactgacagtcacgggcatagatcgctatattgccatctgcaaccccctgagatatagcatgatccttaccaacaaggtaatagccattctgggcatagtcatcattgtcaggactttggtatttgtgactccattcacatttctcaccctgagattgcctttctgtggtgtccggattatccctcatacctattgtgaacacatgggcttggcaaagttagcttgtgccagtattaatgttatatatggattgattgccttctcagtgggatacattgacatttctgtgattggattttcctatgtccagatcctccgagctgtcttccatctcccagcctgggatgcccggcttaaggcactcagcacatgtggctctcacgtctgtgttatgttggctttctacctgccagccctcttttccttcatgacacaccgctttggccacaacatccctcattacatccacattcttctggccaatctgtatgtggtttttccccctgctcttaactctgttatctatggggtcaaaacaaaacagatacgagagcaggtacttaggatactcaaccctaaaagcttttggcattttgaccccaagaggatcttccacaacaattcagttagacaataa

SEQ ID NO: 491 - protein, 309 aa, Homo sapiens
MKNKTVLTEFILLGLTDVPELQVAVFTFLFLAYLLSILGNLTILILTLLDSHLQTPMYFFLRNFSFLEISFTNIFIPRVLISITTGNKSISFAGCFTQYFFAMFLGATEFYLLAAMSYDRYVAICKPLHYTTIMSSRICIQLIFCSWLGGLMAIIPTITLMSQQDFCASNRLNHYFCDYEPLLELSCSDTSLIEKVVFLVASVTLVVTLVLVILSYAFIIKTILKLPSAQQRTKAFSTCSSHMIVISLSYGSCMFMYINPSAKEGDTFNKGVALLITSVAPLLNPFIYTLRNQQVKQPFKDMVKKLLNL

SEQ ID NO: 492 - DNA, 930 bp, Homo sapiens
atgaaaaataaaaccgtgttaactgagtttatccttctgggtctaacagatgtccctgaactccaggtggcagttttcacctttcttttccttgcgtatttactcagcatccttggaaatctgactatcctcatcctcaccttgctggactcccaccttcagactcccatgtatttctttctccggaacttctccttcttggaaatttccttcacaaacatcttcattccaagggtcctgattagcatcacaacagggaacaagagtatcagctttgctggctgcttcactcagtatttctttgccatgttccttggggctacagagttttaccttctggctgccatgtcctatgaccgctatgtggccatctgcaaacctctgcattacaccaccatcatgagcagcagaatctgcatccagctgattttctgctcttggctgggtgggctaatggctattataccaacaatcaccctgatgagtcagcaggacttttgtgcatccaacagactgaatcattacttctgtgactatgagcctcttctggaactctcatgttcagacacaagcctcatagagaaggttgtctttcttgtggcatctgtgaccctggtggtcactctggtgctagtgattctctcctatgcattcattatcaagactattctgaagctcccctctgcccaacaaaggacaaaagccttttccacatgttcttcccacatgattgtcatctccctctcttacggaagctgcatgtttatgtacattaatccctctgcaaaagaaggggatacattcaacaagggagtagctctactcattacttcagttgctcctttgttgaacccctttatttacaccctaaggaaccaacaggtaaaacaacccttcaaggatatggtcaaaaagcttctgaatctttaa

SEQ ID NO: 493 - protein, 317 aa, Homo sapiens
MEGKNQTAPSEFIILGFDHLNELQYLLFTIFFLTYICTLGGNVFIIVVTIADSHLHTPMYYFLGNLALIDICYTTTNVPQMMVHLLSEKKIISYGGCVTQLFAFIFFVGSECLLLAAMAYDRYIAICKPLRYSFIMNKALCSWLAASCWTCGFLNSVLHTVLTFHLPFCGNNQINYFFCDIPPLLILSCGDTSLNELALLSIGILISWTPFLCIILSYLYIISTILRIRSSEGRHKAFSTCASHLLIVILYYGSAIFTYVRPISSYSLEKDRLISVLYSVVTPMLNPVIYTLRNKDIKEAVKAIGRKWQPPVFSSDI

SEQ ID NO: 494 - DNA, 954 bp, Homo sapiens
atggaaggaaagaatcaaacagctccatctgaattcatcatcttggggttcgaccacctgaatgaattgcagtatttactcttcaccatcttctttctgacctacatatgcactttaggaggcaatgtttttatcattgtggtgaccatagctgattcccacctacacacacccatgtattatttcctaggaaatcttgcccttattgacatctgctacactactactaatgtcccccagatgatggtgcatcttctgtcagagaagaaaatcatttcctatggaggctgtgtgacccagctctttgcattcattttctttgttggctcagagtgtctcctcctggcagcaatggcatatgatcgatatattgctatctgtaagccgttaaggtactcatttattatgaacaaggccctgtgcagctggttagcagcctcatgctggacatgtgggtttctcaactcagtgttgcacaccgttctgaccttccacctgcccttctgtggtaacaatcagatcaattatttcttctgtgacatacctcccttgctcatcttgtcttgtggtgatacttccctcaatgaactggctttgctgtccattgggatcctcataagctggactcctttcctgtgcatcatcctttcctacctttacatcatctccaccatcctgaggatccgttcctctgaggggaggcacaaagccttttccacctgtgcctcccacctgctcattgttattctctattatggcagtgctatcttcacgtatgtgaggcccatctcatcttactctctagagaaagatagattgatctcagtgctgtatagtgttgtcacacccatgctgaatcctgtaatttatacgctaaggaataaggacatcaaagaggctgtgaaggccatagggagaaagtggcagccaccagttttctcttctgatatataa

SEQ ID NO: 495 - protein, 314 aa, Homo sapiens
MARKDMAHINCTQATEFILVGLTDHQELKMPLFVLFLSIYLFTVVGNLGLILLIRADTSLNTPMYFFLSNLAFVDFCYSSVITPKMLGNFLYKQNVISFDACATQLGCFLTFMISESLLLASMAYDRYVAICNPLLYMVVMTPGICIQLVAVPYSYSFLMALFHTILTFRLSYCHSNIVNHFYCDDMPLLRLTCSDTRFKQLWIFACAGIMFISSLLIVFVSYMFIISAILRMHSAEGRQKAFSTCGSHMLAVTIFYGTLIFMYLQPSSSHALDTDKMASVFYTVIIPMLNPLIYSLQNKEVKEALKKIIINKN

SEQ ID NO: 496 - DNA, 945 bp, Homo sapiens
atggccagaaaagatatggctcacatcaattgcacccaggcgacagagtttattcttgtgggcctcacagaccatcaggagttgaagatgcccctctttgtgctattcttatccatctacctcttcacagtggtaggcaacttgggtttgatcctactcattagagcggatacaagtctcaacacaccaatgtacttctttcttagcaacctagcttttgtggatttctgttactcttctgtcattacacccaaaatgcttgggaatttcttgtacaaacaaaatgttatatcctttgatgcatgtgctactcaactgggctgctttctcaccttcatgatatcagaatccttgctactggcttccatggcctatgaccgatatgtggccatttgtaaccctctattgtatatggttgtaatgactccaggaatctgcattcaacttgtagcagttccttatagctatagcttcctaatggcactatttcacaccatcctcaccttccgcctctcctattgccactccaacattgtcaaccatttctattgtgatgacatgcctctcctcaggctaacttgctcagacactcgcttcaaacagctctggatctttgcctgtgctggtatcatgttcatttcctcccttctgattgtctttgtctcctacatgttcatcatttctgccatcctgaggatgcattcagctgagggaagacagaaggctttctcgacgtgtggctctcacatgctggcagtcaccatattctatgggaccctcatttttatgtacttacagcctagctctagccatgccctggacacagacaagatggcctctgtcttctacacagtgatcattcccatgttgaatcccttaatctatagcctccagaataaggaggtgaaagaagctctgaagaaaatcattatcaataaaaactag

SEQ ID NO: 497 - protein, 324 aa, Homo sapiens
MAEVNIIYVTVFILKGITNRPELQAPCFGVFLVIYLVTVLGNLGLITLIKIDTRLHTPMYYFLSHLAFVDLCYSSAITPKMMVNFVVERNTIPFHACATQLGCFLTFMITECFLLASMAYDCYVAICSPLHYSTLMSRRVCIQLVAVPYIYSFLVALFHTVITFRLTYCGPNLINHFYCDDLPFLALSCSDTHMKEILIFAFAGFDMISSSSIVLTSYIFIIAAILRIRSTQGQHKAISTCGSHMVTVTIFYGTLIFMYLQPKSNHSLDTDKMASVFYTVVIPMLNPLIYSLRNKEVKDASKKALDKGCENLQILTFLKIRKLY

SEQ ID NO: 498 - DNA, 975 bp, Homo sapiens
atggctgaagttaatatcatttatgtcactgtattcattctgaaaggaattaccaaccggccagagcttcaggccccgtgctttggggtgtttttagttatctatctggtcacagtgctgggcaatcttgggttgattactttaatcaagattgatactcgactccacacacctatgtactatttcctcagccacctggcctttgttgacctttgttactcctctgctattacaccgaagatgatggtgaattttgttgtggaacgcaacaccattcctttccatgcttgtgcaacccaactgggttgttttctcaccttcatgatcactgagtgtttccttctagcctccatggcctacgattgctatgtcgccatctgtagtcccctgcattattcaacactgatgtcaagaagagtctgcattcaactggtggcagttccatatatatacagcttcctggttgccctcttccacaccgttatcactttccgtctgacttactgtggcccaaacttaattaaccatttctattgtgatgacctccccttcttagctctgtcctgctcagacacacacatgaaggaaattctgatatttgcctttgctggctttgatatgatctcttcctcttccattgtcctcacctcctacatctttattattgccgctatcctaaggatccgctctactcaggggcaacacaaagccatttccacctgtggctcccatatggtgactgtcactattttctatggcacactgatctttatgtacctacagcccaaatcaaatcactccttggacacagacaagatggcttctgtattttacacagtggtgatccccatgttaaaccccctaatctatagtctaaggaacaaagaagtgaaagatgcctcaaagaaagccttggataaaggttgtgaaaacttacagatattaacatttttaaaaataagaaaactttattaa

SEQ ID NO: 499 - protein, 309 aa, Homo sapiens
MKNRTMFGEFILLGLTNQPELQVMIFIFLFLTYMLSILGNLTIITLTLLDPHLQTPMYFFLRNFSFLEISFTSIFIPRFLTSMTTGNKVISFAGCLTQYFFAIFLGATEFYLLASMSYDRYVAICKPLHYLTIMSSRVCIQLVFCSWLGGFLAILPPIILMTQVDFCVSNILNHYYCDYGPLVELACSDTSLLELMVILLAVVTLMVTLVLVTLSYTYIIRTILRIPSAQQRTKAFSTCSSHMIVISLSYGSCMFMYINPSAKEGGAFNKGIAVLITSVTPLLNPFIYTLRNQQVKQAFKDSVKKIVKL

SEQ ID NO: 500 - DNA, 930 bp, Homo sapiens
atgaaaaacagaaccatgtttggtgagtttattctactgggccttacaaatcaacctgaactccaagtgatgatattcatctttctgttcctcacctacatgctaagtatcctaggaaatctgactattatcaccctcaccttactagacccccacctccagacccccatgtatttcttcctccggaatttctccttcttagaaatttccttcacatccatttttattcccagatttctgaccagcatgacaacaggaaataaagttatcagctttgctggctgcttgactcagtatttttttgctatatttcttggagctaccgagttttacctcctggcctccatgtcttatgatcgttatgtggccatctgcaaacccttgcattacctgactattatgagcagcagagtctgcatacaactagtgttctgctcctggttggggggattcctagcaatcttaccaccaatcatcctgatgacccaggtagatttctgtgtctccaacattctgaatcactattactgtgactatgggcctctcgtggagcttgcctgctcagacacaagcctcttagaactgatggtcatcctcttggccgttgtgactctcatggttactctggtgctggtgacactttcttacacatacattatcaggactattctgaggatcccttctgcccagcaaaggacaaaggccttttccacttgttcctcccacatgattgtcatctccctctcttatggcagctgcatgtttatgtacattaatccttctgcaaaagaaggaggtgctttcaacaaaggaatagctgtactcattacttcggttactcccttactgaatcccttcatatatactttaagaaatcagcaagtgaaacaagctttcaaggactcagtcaaaaagattgtgaaactttaa

SEQ ID NO: 501 - protein, 305 aa, Homo sapiens
MEFVFLAYPSCPELHILSFLGVSLVYGLIITGNILIVVSIHTETCLCTSMYYFLGSLSGIEICYTAVVVPHILANTLQSEKTITLLGCATQMAFFIALGSADCFLLAAMAYDRYVAICHPLQYPLLMTLTLCVHLVVASVISGLFLSLQLVAFIFSLPFCQAQGIEHFFCDVPPVMHVVCAQSHIHEQSVLVAAILAIAVPFFLITTSYTFIVAALLKIHSAAGRHRAFSTCSSHLTVVLLQYGCCAFMYLCPSSSYNPKQDRFISLVYTLGTPLLNPLIYALRNSEMKGAVGRVLTRNCLSQNS

SEQ ID NO: 502 - DNA, 918 bp, Homo sapiens
atggaatttgtgttcctggcctatccctcctgcccagaactgcatattctgtccttccttggggtcagcctggtttatggtttgatcatcactgggaacattctcattgtggtgtccattcacacagaaacctgtctatgcacatccatgtactatttcctgggcagcctttctgggattgaaatatgctacactgcagtggtggtgccccatatcctggccaacaccctacagtcagagaagaccatcactctcctgggctgtgccacccagatggctttcttcattgcactgggcagtgctgattgcttcctcttggctgccatggcctatgaccgctatgtggccatttgccacccgttgcagtaccctctcctcatgacattgactctttgtgtccacttggttgtggcatcagtcatcagtggtctgttcctgtccttacaactggtggccttcatcttctctctgccattctgccaggctcagggcattgagcacttcttttgtgatgtgccaccagtcatgcatgttgtttgtgctcagagtcacattcatgagcagtcagtgctggtggcagccatactagccattgctgtgcctttcttcctcatcaccacctcctacaccttcatagtggctgctctgctcaagatccactcggctgctggccgccaccgggccttctccacctgctcttcccacctcactgtggtgctgctgcagtatggctgctgtgccttcatgtacctgtgccccagctccagctacaaccccaagcaagatcggttcatctcactggtgtacacattgggaaccccactgctcaacccacttatctatgccctgaggaacagtgagatgaaaggggccgtagggagagttcttaccaggaactgcctttcccagaacagctag

SEQ ID NO: 503 - protein, 295 aa, Homo sapiens [sequence omitted]

SEQ ID NO: 504 - DNA, 888 bp, Homo sapiens
atggggggctttgggactaacatctcaagtactaccagcttcactctaacaggcttccctgagatgaagggtctggagcactggctggctgcccttctgctgctgctttatgctatttccttcctgggcaacatcctcatcctctttatcataaaggaagagcagagcttgcaccagccaatgtactacttcctgtctcttttttctgttaatgacctgggtgtgtccttttctacattgcccactgtactggctgctgtgtgttttcatgccccagagacaacttttgatgcctgcctggcccagatgttcttcatccacttttcctcctggacagagtttggcatcctactggccatgagttttgaccactatgtggccatctgtaacccgctgcgctatgccacagtgctcactgatgtccgtgtggcccacaatggcatatccattgtcatccgcagcttctgcatggtattcccacttcccttcctcctgaagagactgcctttctgtaaggccagtgtggtactggcccattcctactgtctgcatgcagacctgattcggctgccctggggagacactaccatcaacagcatgtatggcctgttcattgtcatctctgcctttggtgtagattcactgctcatcctcctctcctatgtgctcattctacattctgtgctggccattgcctccaggggtgagaggcttaagacactcaacacatgtgtgtcacatatctatgcagtgctgatcttctatgtgcctatggttagtgtgtccatggttcatcgatttgggaggcatgctcctgaatatgtgcacaagttcatgtctctttgtacctccaatgctctacccaattatctattccatcaagactaa

SEQ ID NO: 505 - protein, 310 aa, Homo sapiens
MDWENCSSLTDFFLLGITNNPEMKVTLFAVFLAVYIINFSANLGMIVLIRMDYQLHTPMYFFLSHLSFCDLCYSTATGPKMLVDLLAKNKSIPFYGCALQFLVFCIFADSECLLLSVMAFDRYKAIINPLLYTVNMSSRVCYLLLTGVYLVGIADALIHMTLAFRLCFCGSNEINHFFCDIPPLLLLSRSDTQVNELVLFTVFGFIELSTISGVFISYCYIILSVLEIHSAEGRFKALSTCTSHLSAVAIFQGTLLFMYFRPSSSYSLDQDKMTSLFYTLVVPMLNPLIYSLRNKDVKEALKKLKNKILF

SEQ ID NO: 506 - DNA, 933 bp, Homo sapiens
atggactgggaaaattgctcctcattaactgatttttttctcttgggaattaccaataacccagagatgaaagtgaccctatttgctgtattcttggctgtttatatcattaatttctcagcaaatcttggaatgatagttttaatcagaatggattaccaacttcacacaccaatgtatttcttcctcagtcatctgtctttctgtgatctctgctattctactgcaactgggcccaagatgctggtagatctacttgccaagaacaagtcaatacccttctatggctgtgctctgcaattcttggtcttctgtatctttgcagattctgagtgtctactgctgtcagtgatggcctttgatcggtacaaggccatcatcaaccccctgctctatacagtcaacatgtctagcagagtgtgctatctactcttgactggggtttatctggtgggaatagcagatgctttgatacatatgacactggccttccgcctatgcttctgtgggtctaatgagattaatcatttcttctgtgatatccctcctctcttattactctctcgctcagatacacaggtcaatgagttagtgttattcaccgtctttggttttattgaactgagtaccatttcaggagttttcatttcttattgttatatcatcctatcagtcttggagatacactctgctgaggggaggttcaaagctctctctacatgcacttcccacttatctgcggttgcaattttccagggaactctgctctttatgtatttccggccaagttcttcctattctctagatcaagataaaatgacctcattgttttacacccttgtggttcccatgttgaaccccctgatttatagcctgaggaacaaggatgtgaaagaggccctgaaaaaactgaaaaataaaattttattttaa

SEQ ID NO: 507 - protein, 312 aa, Homo sapiens
MEVKNCCMVTEFILLGIPHTEGLEMTLFVLFLPFYACTLLGNVSILVAVMSSARLHTPMYFFLGNLSVFDMGFSSVTCPKMLLYLMGLSRLISYKDCVCQLFFFHFLGSIECFLFTVMAYDRFTAICYPLRYTVIMNPRICVALAVGTWLLGCIHSSILTSLTFTLPYCGPNEVDHFFCDIPALLPLACADTSLAQRVSFTNVGLISLVCFLLILLSYTRITISILSIRTTEGRRRAFSTCSAHLIAILCAYGPIITVYLQPTPNPMLGTVVQILMNLVGPMLNPLIYTLRNKEVKTALKTILHRTGHVPES

SEQ ID NO: 508 - DNA, 939 bp, Homo sapiens
atggaggtgaagaactgctgcatggtgacagagttcatccttttgggaatcccacacacagaggggctggagatgacactttttgtcttattcttgcccttctatgcctgcactctactgggaaatgtgtctatccttgttgctgttatgtcttctgctcgccttcacacacctatgtatttcttcctgggaaacttgtctgtgtttgacatgggtttctcctcagtgacttgtcccaaaatgctgctctaccttatggggctgagccgactcatctcctacaaagactgtgtctgccagcttttcttcttccatttcctcgggagcattgagtgcttcttgtttacggtgatggcctatgaccgcttcactgccatctgttatcctctgcgatacacagtcatcatgaacccaaggatctgtgtggccctggctgtgggcacatggctgttagggtgcattcattccagtatcttgacctccctcaccttcaccttgccatactgtggtcccaatgaagtggatcacttcttctgtgacattccagcactgttgcccttggcctgtgctgacacatccttagcccagagggtgagcttcaccaacgttggcctcatatctcttgtctgctttctgctaattcttttatcctacactagaatcacaatatctatcttaagcattcgtacaactgagggccgtcgccgtgccttctccacctgcagtgctcacctcattgccatcctctgtgcctatgggcccatcatcactgtctacctgcagcccacacccaaccccatgctgggaaccgtggtacaaattctcatgaatctggtaggaccaatgctgaaccctttgatctataccttgaggaataaggaagtaaaaacagccctgaaaacaatattgcacaggacaggccatgttcctgagagttag

SEQ ID NO: 509 - protein, 313 aa, Homo sapiens
MPIANDTQFHTSSFLLLGIPGLEDVHIWIGFPFFSVYLIALLGNAAIFFVIQTEQSLHEPMYYCLAMLDSIDLSLSTATIPKMLGIFWFNIKEISFGGYLSQMFFIHFFTVMESIVLVAMAFDRYIAICKPLWYTMILTSKIISLIAGIAVLRSLYMVIPLVFLLLRLPFCGHRIIPHTYCEHMGIARLACASIKVNIMFGLGSISLLLLDVLLIILSHIRILYAVFCLPSWEARLKALNTCGSHIGVILAFSTPAFFSFFTHCFGHDIPQYIHIFLANLYVVVPPTLNPVIYGVRTKHIRETVLRIFFKTDH

SEQ ID NO: 510 - DNA, 942 bp, Homo sapiens
atgcctatagctaacgacacccagttccatacttcttcattcctactgctgggtatcccagggctagaagatgtgcacatctggattggattcccttttttctctgtgtatcttattgcactcctgggaaatgctgctatcttctttgtgatccaaactgagcagagtctccatgagcccatgtactactgcctggccatgttggattccattgacctgagcttgtctacggccaccattcccaaaatgctgggcatcttctggttcaatatcaaggaaatatcttttggaggctacctttctcagatgttcttcatccatttcttcactgtcatggagagcatcgtattggtggccatggcctttgaccgctacattgccatttgcaaacctctttggtacaccatgatcctcaccagcaaaatcatcagcctcattgcaggcattgctgtcctgaggagcttgtacatggtcattccactggtgtttctcctcttaaggttgcccttctgtggacatcgtatcatccctcatacttactgtgagcacatgggcattgcccgtctggcctgtgccagcatcaaagtcaacattatgtttggtcttggcagtatttctctcttgttattggatgtgctccttattattctctcccatatcaggatcctctatgctgtcttctgcctgccctcctgggaagctcgactcaaagctctcaacacctgtggctctcacattggtgttatcttagccttttctacaccagcatttttctctttctttacacactgctttggccatgatattccccaatatatccacattttcttggctaatctatatgtggttgttcctcccaccctcaatcctgtaatctatggggtcagaaccaaacatattagggagacagtgctgaggattttcttcaagacagatcactaa

SEQ ID NO: 511 - protein, 312 aa, Homo sapiens
MALGNHSTITEFLLLGLSADPNIRALLFVLFLGIYLLTIMENLMLLLVIRADSCLHKPMYFFLSHLSFVDLCFSSVIVPKMLENLLSQRKTISVEGCLAQVFFVFVTAGTEACLLSGMAYDRHAAIRRPLLYGQIMGKQLYMHLVWGSWGLGFLDALINVLLAVNMVFCEAKIIHHYSYEMPSLLPLSCSDISRSLIVLLCSTLLHGLGNFLLVFLSYTRIISTILSISSTSGRSKAFSTCSAHLTAVTLYYGSGLLRHLMPNSGSPIELIFSVQYTVVTPMLNSLIYSLKNKEVKVALKRTLEKYLQYTRR

SEQ ID NO: 512 - DNA, 939 bp, Homo sapiens
atggccttggggaatcacagcaccatcaccgagttcctcctccttgggctgtctgccgaccccaacatccgggctctgctctttgtgctgttcctggggatttacctcctgaccataatggaaaacctgatgctgctgctcgtgatcagggctgattcttgtctccataagcccatgtatttcttcctgagtcacctctcttttgttgatctctgcttctcttcagtcattgtgcccaagatgctggagaacctcctgtcacagaggaaaaccatttcagtagagggctgcctggctcaggtcttctttgtgtttgtcactgcagggactgaagcctgccttctctcagggatggcctatgaccgccatgctgccatccgccgcccactactttatggacagatcatgggtaaacagctgtatatgcaccttgtgtggggctcatggggactgggctttctggacgcactcatcaatgtcctcctagctgtaaacatggtcttttgtgaagccaaaatcattcaccactacagctatgagatgccatccctcctccctctgtcctgctctgatatctccagaagcctcatcgttttgctctgctccactctcctacatgggctgggaaacttccttttggtcttcttatcctacacccgtataatctctaccatcctaagcatcagctctacctcgggcagaagcaaggccttctccacctgctctgcccacctcactgcagtgacactttactatggctcaggtttgctccgccatctcatgccaaactcaggttcccccatagagttgatcttctctgtgcagtatactgtagtcactcccatgctgaattccctcatctatagcctgaaaaataaggaagtgaaggtagctctgaaaagaactttggaaaaatatttgcaatataccagacgttga

SEQ ID NO: 513 - protein, 5 aa, Artificial Sequence
  Description of Artificial Sequence: Consensus amino acid motif
EFILL

SEQ ID NO: 514 - protein, 6 aa, Artificial Sequence
  Description of Artificial Sequence: Consensus amino acid motif
LHTPMY

SEQ ID NO: 515 - protein, 10 aa, Artificial Sequence
  Description of Artificial Sequence: Consensus amino acid motif
MAYDRYVAIC

SEQ ID NO: 516 - protein, 7 aa, Artificial Sequence
  Description of Artificial Sequence: Consensus amino acid motif
FSTCSSH

SEQ ID NO: 517 - protein, 6 aa, Artificial Sequence
  Description of Artificial Sequence: Consensus amino acid motif
PMLNPF

SEQ ID NO: 518 - protein, 20 aa, Artificial Sequence
  Description of Artificial Sequence: Exemplary translocation domain
MNGTEGPNFYVPFSNKTGVV

SEQ ID NO: 519 - protein, 6 aa, Artificial Sequence
  Description of Artificial Sequence: Synthetic peptide
LFLLYL

SEQ ID NO: 520 - protein, 9 aa, Artificial Sequence
  Description of Artificial Sequence: Synthetic peptide
  MOD_RES (2): a or g
  MOD_RES (3): y or f
MXXDRYVAI

SEQ ID NO: 521 - DNA, 20 bp, Artificial Sequence
  Description of Artificial Sequence: DNA degenerate primer
atggsctwtgaccghtwygt

SEQ ID NO: 522 - protein, 6 aa, Artificial Sequence
  Description of Artificial Sequence: Synthetic peptide
  MOD_RES (3): g or a
TCXSHL

SEQ ID NO: 523 - DNA, 17 bp, Artificial Sequence
  Description of Artificial Sequence: DNA degenerate primer
  modifed_base (6): a, t, c, or g
  modifed_base (9): a, t, c, or g
  modifed_base (15): a, t, c, or g
agrtgnswnscrcangt

SEQ ID NO: 524 - DNA, 25 bp, Artificial Sequence
  Description of Artificial Sequence: Degenerate primer
  modified_base (20): a, g or p which can be the pyrimidine or purine base
  modified_base (22)..(23): a, g or p which can be the pyrimidine or purine base
ggggtccggagrsrtadatnanngg

SEQ ID NO: 525 - DNA, 30 bp, Artificial Sequence
  Description of Artificial Sequence: Degenerate primer
  modified_base (16): a, c, g or t
  modified_base (25): a, c, g or t
ggggctgcagacaccnatgtayytnttyyt

SEQ ID NO: 526 - DNA, 25 bp, Artificial Sequence
  Description of Artificial Sequence: Degenerate primer
  modified_base (20): a, g or p which can be the pyrimidine or purine base
  modified_base (22)..(23): a, g or p which can be the pyrimidine or purine base
ggggtccggagrstradatnanngg

SEQ ID NO: 527 - DNA, 30 bp, Artificial Sequence; identical to SEQ ID NO: 525
  Description of Artificial Sequence: Degenerate primer
  modified_base (16): a, c, g, or t
  modified_base (25): a, c, g,  or t

SEQ ID NO: 528 - DNA, 25 bp, Artificial Sequence
  Description of Artificial Sequence: Degenerate primer
  modified_base (20): a, c, g, or t
  modified_base (22): a, g, c, or t
  modified_base (23): a, g, c, or t
ggggtccggagrstradatnanngg

SEQ ID NO: 529 - DNA, 30 bp, Artificial Sequence; identical to SEQ ID NO: 525
  Description of Artificial Sequence: Degenerate primer
  modified_base (16): a, c, g, or t
  modified_base (25): a, c, g, or t

SEQ ID NO: 530 - protein, 324 aa, Homo sapiens; identical to SEQ ID NO: 217

SEQ ID NO: 531 - protein, 322 aa, Homo sapiens
MSPENQSSVSEFLLLGLPIRPEQQAVFFALFLGMYLTTVLGNLLIMLLIQLDSHLHTPMYFFLSHLALTDISFSSVTVPKMLMNMQTQHLAVFYKGCISQTYFFIFFADLDSFLITSMAYDRYVAICHPLHYATIMTQSQCVMLVAGSWVIACACALLHTLLLAQLSFCADHIIPHYFCDLGALLKLSCSDTSLNQLAIFTAALTAIMLPFLCILVSYGHIGVTILQIPSTKGICKALSTCGSHLSVVTIYYRTIIGLYFLPPSSNTNDKNIIASVIYTAVTPMLNPFIYSLRNKDIKGALRKLLSRSGAVAHACNLNTLGG

1. A method for identifying the putative effect of a compound on olfactory perception in a mammal comprising the following:
(i) assaying the effect of one or more compounds that elicit a known effect on olfactory perception in a mammal in a cell-based assay that detects whether said one or more compounds modulate the activity of an olfactory receptor polypeptide encoded by a nucleic acid sequence having SEQ ID NO: 56 or an olfactory polypeptide which hybridizes under stringent hybridization conditions to said nucleic acid sequence, wherein said stringent hybridization conditions comprise hybridization in 50% formamide, 5×SSC, and 10% SDS, incubation at 42° C. with wash in 0.2×SSC and 0.1% SDS at 65° C., wherein said wash and hybridization step are each conducted for 1 minute; and
(ii) selecting compounds from step (i) that modulate the activity of said olfactory receptor polypeptide in said cell-based assay.

2. The method of claim 125 which further includes an additional step wherein the effect of one or more compounds having an unknown effect on olfactory perception is screened in said cell-based assay and compounds are selected that enhance, inhibit or mimic the modulatory effect of said selected compound(s) having a known effect on olfactory perception on the activity of said olfactory receptor polypeptide in said cell-based assay.

3. The method of claim 125 wherein the receptor polypeptide is encoded by a nucleic acid sequence having SEQ ID No: 56.

4. The method claim 126 wherein said selected compound having an unknown effect on an olfactory perception mimics the modulatory effect of said selected one or more compounds that elicit a known effect on olfactory perception in a mammal on the activity of said olfactory receptor polypeptide.

5. The method of claim 127 wherein said olfactory polypeptide is encoded by the nucleic acid sequence having SEQ ID NO: 56.

6. The method of claim 125 wherein said one or more compounds that elicit a known effect on olfactory perception are fragrance compounds.

7. The method of claim 126 wherein the one or more compounds having an unknown effect on olfactory perception in a mammal are comprised in a compound library.

8. The method of claim 131 wherein said library is a combinatorial chemical library.

9. The method of claim 131 wherein said library is a random combination of compounds.

10. The method of claim 126 wherein said selected compound having a known effect on olfactory perception is a malodorant and the selected compound having an unknown effect on olfactory perception inhibits the modulatory effect of said compound on said olfactory receptor.

11. The method of claim 126 wherein the selected one or more compounds enhance the modulatory effect of said compound having a known effect on olfactory perception on the activity of said olfactory receptor polypeptide.

12. The method of claim 125 wherein the cell that expresses said olfactory receptor expresses a G protein that functionally couples to said receptor.

13. The method of claim 136 wherein said G protein is G_{α15} or G_{α16}.

14. The method of claim 125 wherein the cell-based assay detects the effect of said one or more compounds on levels of intracellular calcium.

15. The method of claim 125 wherein the cell-based assay detects the effect of said one or more compounds on the level of intracellular cyclic nucleotides.

16. The method of claim 125 wherein the cell-based assay detects changes in intracellular calcium by detecting changes in FURA-2 dependent fluorescence in the cell.

17. The method of claims 125 wherein the cell-based assay detects the transfer of 32p from gamma-labeled ATP to said olfactory receptor polypeptide.

18. The method of claim 125 wherein said cell-based assay detects changes in electrophysiology of a cell or cell membrane expressing said olfactory polypeptide.

19. The method of claim 142 wherein electrophysiology is detected by a voltage-clamp or patch-clamp technique.

20. The method of claim 125 wherein the cell-based assay detects changes in total cell current by a radio labeled ion flux assay or fluorescence assay that detects changes in voltage by use of a voltage sensitive dye.

21. The method of claim 125 wherein said cell-based assay detects changes in intracellular levels of second messengers.

22. The method of claim 145 wherein said second messengers are selected from the group consisting of Ca2+, IP3, cGMP and cAMP.

23. The method of claim 146 wherein said cell-based assay detects changes in inositol triphosphate (IP3).

24. The method of claim 125 wherein the cell that expresses said olfactory receptor polypeptide is a HEK-293 cell line that expresses one or more chaperone proteins.

25. The method of claim 125 wherein the cell that expresses said olfactory receptor polypeptide is a HEK-293 cell line that expresses a promiscuous G protein.

26. The method of claim 125 wherein the cell-based assay detects the effect of said one or more compounds on the transcription of a gene of interest or reporter gene.

27. The method of claim 125 wherein said one or more compounds that elicit a known effect on olfactory perception in a mammal are selected from the group consisting of perfumes, fragrances, deodorizing compounds, air freshener compounds, foods, drugs and compositions containing.

28. The method of claim 125 wherein said method is used to identify compounds that block the smell olfactory effect elicited by said one or more compounds having a known effect on olfactory perception in a mammal.

29. The method of claim 125 wherein said method is used to identify compounds that enhance or inhibit the olfactory effect of said one or more compounds having a known effect on olfactory perception in a mammal.

30. The method of claim 125 wherein said one or more compounds are further screened in a cell-based assay that detects the effect of said one or more compounds on the activity of at least one other human olfactory receptor polypeptide.
